(19) United States
(12) Patent Application Publication
(10) Pub. No.: US 2017/0088902 A1
(43) Pub. Date: Mar. 30, 2017

(54) EXPRESSION PROFILING FOR CANCERS TREATED WITH ANTI-ANGIOGENIC THERAPY

(71) Applicant: ALMAC DIAGNOSTICS LIMITED, Craigavon (GB)

(72) Inventors: Denis Paul HARKIN, Dromore (GB); Richard KENNEDY, Belfast (GB); Andrena MCCAVIGAN, Derryadd (GB); Katherine KEATING, Magherafelt (GB); Laura HILL, Lisburn (GB); Steve DEHARO, Belfast (GB); Timothy DAVISON, Hillsborough (GB); Fionnuala PATTERSON, Hauxton (GB); Sinead DONEGAN, Belfast (GB); Gera JELLEMA, Portadown (GB); Charlie GOURLEY, Dumfermline (GB)

(73) Assignee: ALMAC DIAGNOSTICS LIMITED, Craigavon (GB)

(21) Appl. No.: 15/311,618

(22) PCT Filed: May 28, 2015
(86) PCT No.: PCT/GB2015/051557

§ 371 Date: Nov. 16, 2016

(30) Foreign Application Priority Data
May 28, 2014 (GB) 1409476.7

(51) Int. Cl. C12Q 1/68

(52) U.S. Cl. CPC C12Q 1/6886; C12Q 2600/106; C12Q 2600/118; C12Q 2600/158

(57) ABSTRACT

The present invention relates to a cancer sub-type. Provided are methods for determining clinical prognosis of a subject with cancer, selecting whether to administer an anti-angiogenic therapeutic agent to a subject with cancer and predicting responsiveness of a subject with cancer to an anti-angiogenic therapeutic agent. The methods are based on assessing from the expression level of biomarkers disclosed herein whether the cancer belongs to the sub-type. Companion methods of treating cancer and agents for use in treating cancer are also provided.

### FIELD OF THE INVENTION

[0001] The present invention relates to a cancer sub-type. Provided are methods for determining clinical prognosis and selecting whether to administer an anti-angiogenic therapeutic agent based on assessing from the expression level of biomarkers whether the cancer belongs to the sub-type.

### BACKGROUND OF THE INVENTION

[0002] Individualisation of therapy for cancer patients is desirable in order to ensure the most effective treatment for a particular patient. Currently, it is often difficult for healthcare professionals to identify cancer patients who will benefit from a given therapy regime. Thus, patients often needlessly undergo ineffective, toxic drug therapy. The advent of microarrays and molecular genomics has the potential to aid in the prediction of the response of an individual patient to a defined therapeutic regimen.

[0003] Angiogenesis is a key area for therapeutic intervention. This has promoted the development of a number of agents that target angiogenesis related processes and pathways, including the market leader and first FDA-approved anti-angiogenic, bevacizumab (Avastin), produced by Genentech/Roche.

[0004] Treatment regimens that include bevacizumab have demonstrated broad clinical activity ¹⁻¹⁰. However, no overall survival (OS) benefit has been shown after the addition of bevacizumab to cytotoxic chemotherapy in most cancers ^{8, 12-13}. This suggests that a substantial proportion of tumours are either initially resistant or quickly develop resistance to VEGF blockade (the mechanism of action of bevacizumab). In fact, 21% of ovarian, 10% of renal and 33% of rectal cancer patients show partial regression when receiving bevacizumab monotherapy, suggesting that bevacizumab may be active in small subgroups of patients, but that such incremental benefits do not reach significance in unselected patients¹⁵⁻¹⁸. As such, the availability of biomarkers of response to bevacizumab would improve assessment of treatment outcomes and thus enable the identification of patient subgroups that would receive the most clinical benefit from bevacizumab treatment.

[0005] Thus, there is a need for a test that would facilitate the stratification of patients based upon their predicted response to anti-angiogenic therapeutics, either in combination with standard of care or as a single-agent therapeutic. This would allow for the rapid identification of those patients who should receive alternative therapies.

### DESCRIPTION OF THE INVENTION

[0006] A cancer with a given histopathological diagnosis may represent multiple diseases at a molecular level.

[0007] The present inventors have identified a molecular sub-type of high grade serous ovarian cancer (HGSOC) that has an improved prognosis and where the addition of bevacizumab to the treatment regimen significantly reduces overall survival and progression free survival. The sub-type is associated with an up-regulation in molecular signaling related to immune response and a down-regulation in molecular signaling related to angiogenesis and vasculature development, referred to herein as a “non-angiogenesis” or “immune” subtype. The inventors have found that this sub-type can be reliably identified using a range of biomarker expression signatures.

[0008] Thus, in a first aspect the invention provides a method for selecting whether to administer an anti-angiogenic therapeutic agent to a subject with cancer, comprising:

[0009] measuring the expression levels of at least 3 biomarkers in a sample from the subject,

[0010] wherein at least two of the biomarkers are from Table A and at least one of the biomarkers is from Table B and assessing from the expression levels of the biomarkers whether the cancer belongs to a cancer sub-type

[0011] wherein the cancer sub-type is defined by the expression levels of a set of biomarkers associated with angiogenesis and a set of biomarkers associated with immune response

[0012] wherein if the cancer belongs to the sub-type an anti-angiogenic therapeutic agent is contraindicated

[0013] wherein the at least 3 biomarkers do not comprise at least two biomarkers selected from COL1A2, COL3A1, TIMP3, COL4A1, COL8A1, CDH11, TIMP2, ANGPTL2, and MMP14 and at least one biomarker selected from CIITA, XAF1 and CD74.

TABLE A
Angiogenesis PS

| Cluster | | SEQ ID | Core | Gene | | mean expression | |
|---|---|---|---|---|---|---|---|
| # | Probeset ID | NO | (Yes/No) | Symbol | Orientation | in Immune Group | bias |
| 2 | OCHP.1836_s_at | 1 | Yes | GJA1 | Sense (Fully Exonic) | −0.4998 | −0.4190 |
| 2 | OC3P.1987.C1_x_at | 2 | Yes | IGFBP5 | Sense (Fully Exonic) | −0.5447 | −0.3128 |
| 2 | OCADNP.7251_s_at | 3 | Yes | MMP2 | Sense (Fully Exonic) | −0.7734 | −0.6010 |
| 2 | OC3P.4984.C1-787a_s_at | 4 | Yes | COL5A1 | Sense (Fully Exonic) | −0.7237 | −0.6844 |
| 2 | OCRS2.11009_x_at | 5 | Yes | TAGLN | Sense (Fully Exonic) | −0.4502 | −0.2326 |
| 2 | OC3P.89.C6_s_at | 6 | Yes | ELN | Sense (Fully Exonic) | −0.4746 | −0.4273 |
| 2 | OC3P.694.CB1-490a_s_at | 7 | Yes | DCN | Sense (Fully Exonic) | −0.6608 | −0.4760 |
| 2 | OCADNP.9526_s_at | 8 | Yes | CTGF | Sense (Fully Exonic) | −0.5069 | −0.5898 |
| 2 | OCADNP.3131_x_at | 9 | Yes | IGFBP7 | Sense (Includes Intronic) | −0.3405 | −0.4693 |
| 2 | OC3SNG.461-892a_s_at | 10 | Yes | DCN | Sense (Fully Exonic) | −0.6436 | −0.4910 |
| 2 | OC3P.12939.C1_s_at | 11 | Yes | IGF1 | Sense (Fully Exonic) | −0.3956 | −0.3536 |
| 2 | OC3SNG.6042-23a_x_at | 12 | Yes | FGFR1 | Sense (Fully Exonic) | −0.4413 | −0.5410 |
| 2 | OC3P.2790.C1_s_at | 13 | Yes | THY1 | Sense (Fully Exonic) | −0.6144 | −0.4273 |
| 2 | OC3SNGnh.5811_at | 14 | Yes | DMD | Sense (Includes Intronic) | −0.3557 | −0.2186 |
| 2 | OC3P.1178.C1_x_at | 15 | Yes | CTGF | Sense (Fully Exonic) | −0.5309 | −0.5211 |
| 2 | OC3SNGn.1211-6a_s_at | 16 | Yes | COL3A1 | Sense (Fully Exonic) | −0.7527 | −0.6400 |
| 2 | OCHP.1216_s_at | 17 | Yes | ACTA2 | Sense (Fully Exonic) | −0.5347 | −0.5909 |
| 2 | OCMXSNG.274_s_at | 18 | Yes | NFKBIZ | AntiSense | 0.0554 | 0.0891 |
| 2 | OC3SNGn.1637-35a_s_at | 19 | Yes | ZFP36 | Sense (Fully Exonic) | 0.0280 | −0.0911 |
| 2 | OC3P.1910.C1_s_at | 20 | Yes | EGR1 | Sense (Fully Exonic) | −0.1851 | −0.1155 |
| 2 | OC3P.564.C1-358a_s_at | 21 | Yes | VMP1 | Sense (Fully Exonic) | −0.1199 | −0.0070 |
| 2 | OC3P.3499.C1_s_at | 22 | Yes | FAT1 | Sense (Fully Exonic) | −0.4657 | −0.3351 |
| 2 | OC3P.7845.C1_s_at | 23 | Yes | COL14A1 | Sense (Fully Exonic) | −0.3109 | −0.2482 |
| 2 | OC3SNGnh.3734_s_at | 24 | Yes | TGFB2 | Sense (Fully Exonic) | −0.2690 | −0.1760 |
| 2 | OC3P.4123.C1_x_at | 25 | Yes | MMP14 | Sense (Fully Exonic) | −0.7302 | −0.6159 |
| 2 | OCADNP.2432_s_at | 26 | Yes | EGR1 | AntiSense | −0.1490 | −0.0805 |
| 2 | OC3P.1987.CB1_x_at | 27 | Yes | IGFBP5 | Sense (Fully Exonic) | −0.5509 | −0.2866 |
| 2 | OC3P.14073.C1_s_at | 28 | Yes | COL12A1 | Sense (Fully Exonic) | −0.4360 | −0.4135 |
| 2 | OC3P.2409.C1_s_at | 29 | Yes | MIR21 | Sense (Fully Exonic) | −0.0786 | 0.0052 |
| 2 | OC3SNGnh.14507_x_at | 30 | Yes | RORA | Sense (Includes Intronic) | −0.4118 | −0.3526 |
| 2 | OC3P.354.CB1_s_at | 31 | Yes | COL1A1 | Sense (Fully Exonic) | −0.7565 | −0.6116 |
| 2 | OC3P.3100.C1_s_at | 32 | Yes | RGS2 | Sense (Fully Exonic) | −0.3108 | −0.2359 |
| 2 | OC3SNGnh.14507_at | 33 | Yes | RORA | Sense (Includes Intronic) | −0.3389 | −0.2364 |
| 2 | OCMXSNG.5052_s_at | 34 | Yes | FN1 | AntiSense | −0.4764 | −0.5067 |
| 2 | OC3SNGn.2375-26a_s_at | 35 | Yes | MMP11 | Sense (Fully Exonic) | −0.4921 | −0.7305 |
| 2 | OC3P.2679.C1_s_at | 36 | Yes | ANGPTL2 | Sense (Fully Exonic) | −0.6830 | −0.5973 |
| 2 | OCADA.11214_s_at | 37 | Yes | SPHK2 | Sense (Fully Exonic) | −0.1649 | −0.3022 |
| 2 | OCRS2.11542_s_at | 38 | Yes | TWIST1 | Sense (Fully Exonic) | −0.6596 | −0.4253 |
| 2 | OCMX.15173.C1_s_at | 39 | Yes | VCAN | Sense (Fully Exonic) | −0.7228 | −0.6443 |
| 2 | OC3SNGn.2538-539a_x_at | 40 | Yes | COL1A2 | Sense (Fully Exonic) | −0.8816 | −0.6950 |
| 2 | OC3SNGn.8705-760a_x_at | 41 | Yes | MGP | Sense (Fully Exonic) | −0.1183 | −0.2157 |
| 2 | OC3SNG.1640-14a_s_at | 42 | Yes | SMARCA1 | Sense (Fully Exonic) | −0.5240 | −0.2337 |
| 2 | OC3SNG.5134-22a_s_at | 43 | Yes | IGFBP4 | Sense (Fully Exonic) | −0.6135 | −0.6133 |
| 2 | OCADA.9921_s_at | 44 | Yes | FOS | Sense (Fully Exonic) | −0.1143 | −0.1006 |
| 2 | OC3P.5101.C1_s_at | 45 | Yes | NR2F1 | Sense (Fully Exonic) | −0.5796 | −0.5018 |
| 2 | OC3P.3764.C1_s_at | 46 | Yes | MMP11 | Sense (Fully Exonic) | −0.5294 | −0.6942 |
| 2 | OC3SNG.2502-79a_s_at | 47 | Yes | IGFBP5 | Sense (Fully Exonic) | −0.5301 | −0.3920 |
| 2 | OCHP.1534_s_at | 48 | Yes | LUM | Sense (Fully Exonic) | −0.5754 | −0.4696 |
| 2 | OC3P.10470.C1_s_at | 49 | Yes | TIMP3 | Sense (Fully Exonic) | −0.5642 | −0.5616 |
| 2 | OC3SNGnh.19479_s_at | 50 | Yes | EGR1 | AntiSense | −0.1970 | −0.1264 |
| 2 | OC3P.13634.C1_s_at | 51 | Yes | IRS2 | Sense (Fully Exonic) | −0.4432 | −0.4892 |
| 2 | OC3P.373.C1-533a_s_at | 52 | Yes | RHOB | Sense (Fully Exonic) | −0.4433 | −0.2783 |
| 2 | OCMX.8.C2_s_at | 53 | Yes | EGR1 | AntiSense | 0.0109 | −0.0248 |
| 2 | OC3SNGnh.985_s_at | 54 | Yes | ABLIM1 | Sense (Fully Exonic) | −0.3497 | −0.2860 |
| 2 | OC3P.3458.C1_s_at | 55 | Yes | AEBP1 | Sense (Fully Exonic) | −0.6274 | −0.5348 |
| 2 | OC3SNGn.8474-50a_x_at | 56 | Yes | COL1A2 | Sense (Fully Exonic) | −0.8915 | −0.7965 |
| 2 | OC3P.81.CB2_s_at | 57 | Yes | COL3A1 | Sense (Fully Exonic) | −0.7728 | −0.6448 |
| 2 | OC3P.564.C1_s_at | 58 | Yes | VMP1 | Sense (Fully Exonic) | −0.0002 | −0.0165 |
| 2 | OCHP.148_s_at | 59 | Yes | CDH11 | Sense (Fully Exonic) | −0.6261 | −0.6122 |
| 2 | OC3P.4001.C1_s_at | 60 | Yes | GADD45B | Sense (Fully Exonic) | −0.3177 | −0.1886 |
| 2 | OC3P.1200.C1_s_at | 61 | Yes | VCAN | Sense (Fully Exonic) | −0.7519 | −0.6159 |
| 2 | OCMXSNG.5132_s_at | 62 | Yes | COL1A1 | AntiSense | −0.8073 | −0.6347 |
| 2 | OC3P.13652.C1_s_at | 63 | Yes | COL8A1 | Sense (Fully Exonic) | −0.6009 | −0.6239 |
| 2 | OC3P.1292.C1_s_at | 64 | Yes | EMP1 | Sense (Fully Exonic) | −0.5022 | −0.3751 |
| 2 | OC3P.543.CB1-699a_s_at | 65 | Yes | TIMP2 | Sense (Fully Exonic) | −0.7411 | −0.6593 |
| 2 | OC3P.2713.C1_s_at | 66 | Yes | COL5A2 | Sense (Fully Exonic) | −0.7083 | −0.7010 |
| 2 | OCHP.769_s_at | 67 | Yes | PDGFRA | Sense (Fully Exonic) | −0.5769 | −0.4759 |
| 2 | OC3SNGn.484-1a_s_at | 68 | Yes | HOXC6 | Sense (Fully Exonic) | −0.1743 | −0.2252 |
| 2 | OCADNP.830_s_at | 69 | Yes | IGFBP5 | Sense (Fully Exonic) | −0.4702 | −0.3184 |
| 2 | OC3SNGn.2801-166a_s_at | 70 | Yes | TWIST1 | Sense (Fully Exonic) | −0.6419 | −0.7108 |
| 2 | OCMXSNG.2027_x_at | 71 | Yes | TWIST1 | AntiSense | −0.6599 | −0.5645 |
| 2 | OCADA.8344_s_at | 72 | Yes | TPM1 | Sense (Includes Intronic) | −0.2574 | −0.2064 |
| 2 | OCHPRC.15_s_at | 73 | Yes | MSX1 | Sense (Fully Exonic) | −0.0635 | −0.2121 |
| 2 | OC3P.11485.C1_s_at | 74 | Yes | PSD3 | Sense (Fully Exonic) | −0.5048 | −0.3704 |
| 2 | OC3P.11604.C1_s_at | 75 | Yes | THBS1 | Sense (Fully Exonic) | −0.4353 | −0.2976 |
| 2 | OC3SNGn.793-57a_s_at | 76 | Yes | STMN3 | Sense (Fully Exonic) | −0.1961 | −0.1494 |
| 2 | OC3P.5893.C1_s_at | 77 | Yes | IRS1 | Sense (Fully Exonic) | −0.5374 | −0.4238 |
| 2 | OC3P.13061.C1_s_at | 78 | Yes | ROBO1 | Sense (Fully Exonic) | −0.4637 | −0.3727 |
| 2 | OCMXSNG.2027_at | 79 | Yes | TWIST1 | AntiSense | −0.6848 | −0.6751 |
| 2 | OC3P.10233.C1_s_at | 80 | Yes | TGFB3 | Sense (Fully Exonic) | −0.4452 | −0.3709 |
| 2 | OCMX.11138.C1_x_at | 81 | Yes | IGF1 | AntiSense | −0.2342 | −0.3079 |
| 2 | OCADA.6468_s_at | 82 | Yes | MSN | Sense (Includes Intronic) | 0.0426 | 0.2319 |
| 2 | OC3P.7062.C1_s_at | 83 | Yes | SGCB | Sense (Fully Exonic) | −0.3278 | −0.2089 |
| 2 | OC3SNG.1705-33a_s_at | 84 | Yes | WNT7A | Sense (Fully Exonic) | −0.5164 | −0.7588 |
| 2 | OC3P.164.C1_s_at | 85 | Yes | NID2 | Sense (Fully Exonic) | −0.4941 | −0.3889 |
| 2 | OC3SNGnh.6980_s_at | 86 | Yes | IGFBP5 | AntiSense | −0.4812 | −0.2969 |
| 2 | OC3SNGn.469-921a_s_at | 87 | Yes | EGR1 | Sense (Fully Exonic) | −0.0509 | −0.1453 |
| 2 | OCMX.493.C1_s_at | 88 | Yes | FN1 | Sense (Fully Exonic) | −0.3423 | −0.1453 |
| 2 | OC3P.10127.C1_s_at | 89 | Yes | HOXC6 | Sense (Fully Exonic) | −0.1116 | −0.1512 |
| 2 | OC3P.2278.C1_x_at | 90 | Yes | CERCAM | Sense (Fully Exonic) | −0.7347 | −0.7399 |
| 2 | OC3P.2179.C1_s_at | 91 | Yes | SULF2 | Sense (Fully Exonic) | −0.6395 | −0.5969 |
| 2 | OC3P.8087.C1_s_at | 92 | Yes | GAS7 | Sense (Fully Exonic) | −0.4776 | −0.4086 |
| 2 | OC3P.3034.C1_s_at | 93 | Yes | NDN | Sense (Fully Exonic) | −0.5590 | −0.5346 |
| 2 | OC3P.1178.C1_at | 94 | Yes | CTGF | Sense (Fully Exonic) | −0.4900 | −0.4178 |
| 2 | OC3P.10040.C1_s_at | 95 | Yes | PDGFC | Sense (Fully Exonic) | −0.4219 | −0.3349 |
| 2 | OC3SNGnh.11427_x_at | 96 | Yes | COL12A1 | Sense (Includes Intronic) | −0.3941 | −0.3794 |
| 2 | OCADA.1904_s_at | 97 | Yes | PDGFC | Sense (Includes Intronic) | −0.3168 | −0.1160 |
| 2 | OC3SNGnh.11631_s_at | 98 | Yes | SDK1 | Sense (Includes Intronic) | −0.6334 | −0.4632 |
| 2 | OCADNP.13759_s_at | 99 | Yes | DPYSL3 | Sense (Includes Intronic) | −0.3283 | −0.1273 |
| 2 | OC3SNG.5645-98a_x_at | 100 | Yes | CCDC80 | Sense (Fully Exonic) | −0.5288 | −0.3665 |
| 2 | OC3SNGnh.487_at | 101 | Yes | TPM1 | Sense (Fully Exonic) | −0.2798 | −0.1964 |
| 2 | OC3SNG.3829-22a_s_at | 102 | Yes | CSRNP1 | Sense (Fully Exonic) | −0.0370 | −0.1197 |
| 2 | OCHP.164_s_at | 103 | Yes | PROCR | Sense (Fully Exonic) | −0.2058 | −0.3175 |
| 2 | OC3P.10157.C1_s_at | 104 | Yes | COL15A1 | Sense (Fully Exonic) | −0.3492 | −0.3688 |
| 2 | OCMX.11138.C1_at | 105 | Yes | IGF1 | AntiSense | −0.2100 | −0.3583 |
| 2 | OC3SNGnh.11427_at | 106 | Yes | COL12A1 | Sense (Includes Intronic) | −0.3071 | −0.1665 |
| 2 | OCHP.1423_s_at | 107 | Yes | APCDD1 | Sense (Fully Exonic) | −0.4017 | −0.3332 |
| 2 | OCADNP.8535_s_at | 108 | Yes | FGFR1 | Sense (Fully Exonic) | −0.2415 | −0.2793 |
| 2 | OC3P.13517.C1_s_at | 109 | Yes | EDA2R | Sense (Fully Exonic) | −0.4296 | −0.2344 |
| 2 | OC3SNGnh.1613_at | 110 | Yes | ACSL4 | Sense (Includes Intronic) | −0.1428 | −0.0762 |
| 2 | OCMX.2061.C1_s_at | 111 | Yes | ENC1 | Sense (Fully Exonic) | −0.3510 | −0.3167 |
| 2 | OC3P.560.C1_s_at | 112 | Yes | JAM3 | Sense (Fully Exonic) | −0.5978 | −0.7041 |
| 2 | OC3SNG.1834-947a_s_at | 113 | Yes | COL10A1 | Sense (Fully Exonic) | −0.5399 | −0.4784 |
| 2 | OC3P.6769.C1_s_at | 114 | Yes | HOPX | Sense (Fully Exonic) | −0.3602 | −0.3815 |
| 2 | OC3SNGn.2612-800a_s_at | 115 | Yes | ARL4A | Sense (Fully Exonic) | −0.2482 | −0.1542 |
| 2 | OCADNP.2893_s_at | 116 | Yes | ASH2L | Sense (Includes Intronic) | −0.0048 | 0.0555 |
| 2 | OCRS.320_s_at | 117 | Yes | NOX4 | Sense (Fully Exonic) | −0.1853 | −0.1276 |
| 2 | OC3SNGn.6594-7a_s_at | 118 | Yes | COL14A1 | Sense (Fully Exonic) | −0.0757 | 0.0013 |
| 2 | OC3P.5849.C1_s_at | 119 | Yes | TYRO3 | Sense (Fully Exonic) | −0.0297 | −0.0889 |
| 2 | OC3P.10562.C1_s_at | 120 | Yes | COL8A1 | Sense (Fully Exonic) | −0.5165 | −0.4212 |
| 2 | OC3SNGnh.5170_x_at | 121 | Yes | RORA | Sense (Includes Intronic) | −0.1302 | −0.3066 |
| 2 | OC3P.6842.C1_s_at | 122 | Yes | NPAS2 | Sense (Fully Exonic) | −0.1420 | 0.0132 |
| 2 | OC3P.5913.C1_s_at | 123 | Yes | PRICKLE2 | Sense (Fully Exonic) | −0.4466 | −0.4348 |
| 2 | OC3SNGnh.14944_at | 124 | Yes | PLA2R1 | Sense (Includes Intronic) | −0.1046 | −0.1698 |
| 2 | OCADA.7782_s_at | 125 | Yes | GSN | Sense (Includes Intronic) | −0.2917 | −0.2583 |
| 2 | OC3P.12692.C1_s_at | 126 | Yes | ADH5 | Sense (Fully Exonic) | −0.3531 | −0.2766 |
| 2 | OCHP.1016_s_at | 127 | Yes | APOD | Sense (Fully Exonic) | −0.2923 | −0.3323 |
| 2 | OCHP.739_s_at | 128 | Yes | PLAU | Sense (Fully Exonic) | −0.2212 | −0.1977 |
| 2 | OC3P.8445.C1_s_at | 129 | Yes | NRP1 | Sense (Fully Exonic) | −0.2833 | −0.2569 |
| 2 | OC3SNGn.7890-859a_x_at | 130 | Yes | WNT4 | Sense (Fully Exonic) | −0.2175 | −0.3361 |
| 2 | OC3SNGnh.3154_s_at | 131 | Yes | CHN1 | Sense (Fully Exonic) | −0.5802 | −0.5367 |
| 2 | OC3P.305.C1_at | 132 | Yes | BTG2 | Sense (Fully Exonic) | 0.1127 | −0.0791 |
| 2 | OC3SNGn.6036-20a_x_at | 133 | Yes | FGFR1 | Sense (Fully Exonic) | −0.3997 | −0.3814 |
| 2 | OC3P.697.C1_s_at | 134 | Yes | NFKBIZ | Sense (Fully Exonic) | 0.0166 | 0.0547 |
| 2 | OCMXSNG.5132_x_at | 135 | Yes | COL1A1 | AntiSense | −0.8603 | −0.6216 |
| 2 | OC3P.1878.C1_s_at | 136 | Yes | TNC | Sense (Fully Exonic) | −0.2603 | −0.2119 |
| 2 | OC3SNGnh.5090_at | 137 | Yes | TPM1 | Sense (Fully Exonic) | −0.2257 | −0.1486 |
| 2 | OC3P.13621.C1_s_at | 138 | Yes | SFRP2 | Sense (Fully Exonic) | −0.2070 | −0.2520 |
| 2 | OC3SNGnh.8739_s_at | 139 | Yes | DUSP4 | Sense (Fully Exonic) | −0.1419 | −0.2038 |
| 2 | OCHP.1881_s_at | 140 | Yes | KIT | Sense (Fully Exonic) | −0.4643 | −0.5299 |
| 2 | OCHP.1072_s_at | 141 | Yes | CXCL14 | Sense (Fully Exonic) | −0.7036 | −0.7096 |
| 2 | OCRS.383_s_at | 142 | Yes | COL10A1 | Sense (Fully Exonic) | −0.3721 | −0.4865 |
| 2 | OCHPRC.106_s_at | 143 | Yes | ADAMTS2 | Sense (Fully Exonic) | −0.5826 | −0.6585 |
| 2 | OCHP.1005_s_at | 144 | Yes | COL5A1 | Sense (Fully Exonic) | −0.6231 | −0.5273 |
| 2 | OC3P.925.C1_s_at | 145 | Yes | ANTXR1 | Sense (Fully Exonic) | −0.7671 | −0.6024 |
| 2 | OC3P.9910.C1_s_at | 146 | Yes | FBLIM1 | Sense (Fully Exonic) | −0.7257 | −0.4521 |
| 2 | OCRS2.9432_s_at | 147 | Yes | SPAG16 | Sense (Fully Exonic) | −0.1089 | 0.0000 |
| 2 | OC3SNGnh.16119_at | 148 | Yes | PDGFD | Sense (Includes Intronic) | −0.1329 | −0.2945 |
| 2 | OCADNP.7019_s_at | 149 | Yes | PLXNA4 | Sense (Fully Exonic) | −0.1474 | −0.3637 |
| 2 | OC3P.8373.C1_s_at | 150 | Yes | SDC2 | Sense (Fully Exonic) | −0.4106 | −0.4582 |
| 2 | OC3P.13498.C1_s_at | 151 | Yes | NAV1 | Sense (Fully Exonic) | −0.5696 | −0.4732 |
| 2 | OC3SNGnh.19238_s_at | 152 | Yes | TIMP2 | Sense (Fully Exonic) | −0.7506 | −0.8010 |
| 2 | OC3P.2537.CB1_s_at | 153 | Yes | MYL9 | Sense (Fully Exonic) | −0.3703 | −0.2316 |
| 2 | OCADA.6829_s_at | 154 | Yes | MAP3K1 | Sense (Includes Intronic) | −0.1712 | −0.0706 |
| 2 | OC3P.5230.C1_s_at | 155 | Yes | EPDR1 | Sense (Fully Exonic) | −0.4676 | −0.3070 |
| 2 | OCADA.3572_s_at | 156 | Yes | TRIM13 | Sense (Fully Exonic) | −0.3381 | −0.2101 |
| 2 | OCADA.7893_s_at | 157 | Yes | EFNA5 | Sense (Fully Exonic) | −0.1234 | −0.1621 |
| 2 | OC3SNG.1306-60a_s_at | 158 | Yes | DDR2 | Sense (Fully Exonic) | −0.2990 | −0.4008 |
| 2 | OC3P.850.C1-1145a_s_at | 159 | Yes | COL4A1 | Sense (Fully Exonic) | −0.8270 | −0.8242 |
| 2 | OC3SNGnh.9087_at | 160 | Yes | EFNA5 | AntiSense | −0.2111 | −0.0308 |
| 2 | OC3SNGnh.12139_at | 161 | Yes | FYN | Sense (Fully Exonic) | −0.1142 | −0.1521 |

TABLE B
Immune PS

| Cluster | | SEQ ID | Core | Gene | | mean expression | |
|---|---|---|---|---|---|---|---|
| # | Probeset ID | NO | (Yes/No) | Symbol | Orientation | in Immune Group | bias |
| 1 | OC3P.141.C13_s_at | 162 | Yes | HLA-F | Sense (Fully Exonic) | 0.3512 | 0.4146 |
| 1 | OC3SNGn.2735-12a_s_at | 163 | Yes | HLA-DPA1 | Sense (Fully Exonic) | 0.4004 | 0.4337 |
| 1 | OC3P.5227.C1_s_at | 164 | Yes | HCLS1 | Sense (Fully Exonic) | 0.0636 | 0.0808 |
| 1 | OCHP.345_s_at | 165 | Yes | SFN | Sense (Fully Exonic) | 0.1115 | 0.1967 |
| 1 | OCMXSNG.5067_s_at | 166 | Yes | B2M | Sense (Fully Exonic) | 0.3440 | 0.4275 |
| 1 | OC3P.7557.C1_s_at | 167 | Yes | NLRC5 | Sense (Fully Exonic) | 0.3322 | 0.4390 |
| 1 | OCRS2.2571_s_at | 168 | Yes | HCLS1 | Sense (Fully Exonic) | 0.0461 | 0.0695 |
| 1 | OCMXSNG.5608_at | 169 | Yes | APOL1 | AntiSense | 0.2376 | 0.2180 |
| 1 | OCRS2.4310_s_at | 170 | Yes | ITGB2 | Sense (Fully Exonic) | 0.0740 | 0.1774 |
| 1 | OCHP.1588_s_at | 171 | Yes | STAT1 | Sense (Fully Exonic) | 0.3506 | 0.4967 |
| 1 | OCHP.1640_s_at | 172 | Yes | NNMT | Sense (Fully Exonic) | −0.1648 | −0.2533 |
| 1 | OC3P.7284.C1_s_at | 173 | Yes | VCAM1 | Sense (Fully Exonic) | −0.2257 | −0.2808 |
| 1 | OC3SNG.2605-236a_x_at | 174 | Yes | XAF1 | Sense (Fully Exonic) | 0.4106 | 0.5108 |
| 1 | OC3P.805.C1_s_at | 175 | Yes | CIITA | Sense (Fully Exonic) | 0.4992 | 0.5791 |
| 1 | OCRS2.731_x_at | 176 | Yes | HLA-B | Sense (Fully Exonic) | 0.3616 | 0.5702 |
| 1 | OC3P.2460.C1_s_at | 177 | Yes | IFIT2 | Sense (Fully Exonic) | 0.3214 | 0.3687 |
| 1 | OC3P.3169.C1_s_at | 178 | Yes | GBP2 | Sense (Fully Exonic) | 0.1979 | 0.2353 |
| 1 | OC3SNGn.6880-3840a_x_at | 179 | Yes | HLA-A | Sense (Fully Exonic) | 0.3232 | 0.4391 |
| 1 | OC3SNGn.1244-62a_x_at | 180 | Yes | HLA-A | Sense (Fully Exonic) | 0.0343 | 0.3472 |
| 1 | OCRS2.4548_s_at | 181 | Yes | PML | Sense (Fully Exonic) | 0.2464 | 0.1236 |
| 1 | OCMXSNG.5528_s_at | 182 | Yes | C1QC | AntiSense | 0.0561 | 0.1424 |
| 1 | OC3P.4435.C1-401a_s_at | 183 | Yes | IRF1 | Sense (Fully Exonic) | 0.4130 | 0.5033 |
| 1 | OC3P.8722.C1_s_at | 184 | Yes | ITGB2 | Sense (Fully Exonic) | 0.1402 | 0.2332 |
| 1 | OC3P.1164.C1_s_at | 185 | Yes | HLA-DPB1 | Sense (Fully Exonic) | 0.0267 | 0.1437 |
| 1 | OC3SNGn.6460-38a_x_at | 186 | Yes | HLA-A | Sense (Fully Exonic) | 0.0686 | 0.3330 |
| 1 | OC3P.141.C12_x_at | 187 | Yes | HLA-B | Sense (Fully Exonic) | 0.3578 | 0.5488 |
| 1 | OC3P.5468.C1_s_at | 188 | Yes | C1QB | Sense (Fully Exonic) | 0.1769 | 0.1907 |
| 1 | OC3P.1177.C1_x_at | 189 | Yes | APOL1 | Sense (Fully Exonic) | 0.2318 | 0.1271 |
| 1 | OC3SNG.1495-79a_s_at | 190 | Yes | BST2 | Sense (Fully Exonic) | 0.1831 | 0.2477 |
| 1 | OCMX.670.CB2_at | 191 | Yes | CD74 | AntiSense | 0.4907 | 0.5318 |
| 1 | OC3SNG.4002-20a_s_at | 192 | Yes | RASGRP2 | Sense (Fully Exonic) | 0.0743 | 0.0246 |
| 1 | OC3SNGnh.19645_s_at | 193 | Yes | MX1 | Sense (Fully Exonic) | 0.3941 | 0.5564 |
| 1 | OCHP.366_s_at | 194 | Yes | CTSB | Sense (Fully Exonic) | −0.0673 | 0.0000 |
| 1 | OCMX.125.C1_s_at | 195 | Yes | GBP1 | AntiSense | 0.4669 | 0.5520 |
| 1 | OC3P.4873.C1_s_at | 196 | Yes | XAF1 | Sense (Fully Exonic) | 0.3593 | 0.5107 |
| 1 | OCADNP.3105_s_at | 197 | Yes | B2M | Sense (Includes Intronic) | 0.3000 | 0.3888 |
| 1 | OCRS2.2819_x_at | 198 | Yes | HLA-F | Sense (Fully Exonic) | 0.3840 | 0.4789 |
| 1 | OC3P.6011.C1_s_at | 199 | Yes | PLCG2 | Sense (Fully Exonic) | 0.0644 | −0.0159 |
| 1 | OC3SNG.856-35a_x_at | 200 | Yes | C1QC | Sense (Fully Exonic) | 0.1522 | 0.1744 |
| 1 | OC3SNGn.3058-31a_s_at | 201 | Yes | GBP5 | Sense (Fully Exonic) | 0.4388 | 0.2827 |
| 1 | OC3P.14483.C1_s_at | 202 | Yes | SOD2 | Sense (Fully Exonic) | 0.1843 | 0.2792 |
| 1 | OC3SNGn.2005-402a_s_at | 203 | Yes | CD163 | Sense (Fully Exonic) | 0.0270 | 0.1413 |
| 1 | OC3SNGnh.10611_x_at | 204 | Yes | BST2 | Sense (Fully Exonic) | −0.0402 | 0.1233 |
| 1 | OC3SNG.2053-58a_s_at | 205 | Yes | FBP1 | Sense (Fully Exonic) | 0.2508 | 0.2776 |
| 1 | OC3P.4732.C1_s_at | 206 | Yes | CD44 | Sense (Fully Exonic) | 0.1702 | 0.1368 |
| 1 | OCRS2.2819_at | 207 | Yes | HLA-F | Sense (Fully Exonic) | 0.4535 | 0.5759 |
| 1 | OC3SNG.3064-21a_x_at | 208 | Yes | CD74 | Sense (Fully Exonic) | 0.3467 | 0.3885 |
| 1 | Adx-Hs-ISGF3A-300-3_x_at | 209 | Yes | STAT1 | Sense (Fully Exonic) | 0.2161 | 0.3869 |
| 1 | OC3SNGn.6006-1022a_s_at | 210 | Yes | C1S | Sense (Fully Exonic) | −0.2849 | −0.2531 |
| 1 | OCADA.10565_s_at | 211 | Yes | GBP1 | Sense (Fully Exonic) | 0.3837 | 0.4946 |
| 1 | OC3P.530.C1-561a_s_at | 212 | Yes | XBP1 | Sense (Fully Exonic) | 0.2479 | 0.1445 |
| 1 | OC3P.4729.C1_s_at | 213 | Yes | HLA-DMB | Sense (Fully Exonic) | 0.4402 | 0.5053 |
| 1 | OC3P.9869.C1_s_at | 214 | Yes | MAFB | Sense (Fully Exonic) | −0.2958 | −0.2942 |
| 1 | OCADA.3339_s_at | 215 | Yes | DERL3 | Sense (Fully Exonic) | −0.0282 | 0.0194 |
| 1 | OC3SNG.3595-3338a_s_at | 216 | Yes | CYLD | Sense (Fully Exonic) | 0.1067 | 0.1572 |
| 1 | Adx-Hs-ISGF3A-400-3_x_at | 217 | Yes | STAT1 | Sense (Fully Exonic) | 0.2313 | 0.3557 |
| 1 | OC3SNGn.883-5a_s_at | 218 | Yes | TREM2 | Sense (Fully Exonic) | 0.2394 | −0.0068 |
| 1 | OC3SNGnh.2550_s_at | 219 | Yes | FCER1G | Sense (Fully Exonic) | 0.0441 | 0.1559 |
| 1 | OC3P.1033.C1_s_at | 220 | Yes | LGALS9 | Sense (Fully Exonic) | 0.3702 | 0.4531 |
| 1 | OC3P.7068.C1_s_at | 221 | Yes | UBE2L6 | Sense (Fully Exonic) | 0.4012 | 0.4545 |
| 1 | OCHP.1827_s_at | 222 | Yes | SIGLEC1 | Sense (Fully Exonic) | 0.3244 | 0.2161 |
| 1 | OC3SNGn.5100-4676a_s_at | 223 | Yes | MMP7 | Sense (Fully Exonic) | 0.0456 | 0.1118 |
| 1 | OCADA.10811_s_at | 224 | Yes | SLAMF7 | Sense (Fully Exonic) | 0.3653 | 0.3153 |
| 1 | OC3P.5930.C1_at | 225 | Yes | LITAF | Sense (Fully Exonic) | 0.0439 | 0.1634 |
| 1 | OC3P.10280.C1_s_at | 226 | Yes | IFIH1 | Sense (Fully Exonic) | 0.4117 | 0.5086 |
| 1 | OC3SNG.2984-24a_s_at | 227 | Yes | TYROBP | Sense (Fully Exonic) | 0.1072 | 0.0052 |
| 1 | OC3P.10546.C1_s_at | 228 | Yes | ALOX5 | Sense (Fully Exonic) | −0.0189 | −0.0037 |
| 1 | OCHP.489_s_at | 229 | Yes | IL1RN | Sense (Fully Exonic) | 0.1878 | 0.1202 |
| 1 | OC3P.7013.C1_s_at | 230 | Yes | ADAM8 | Sense (Fully Exonic) | 0.1126 | 0.1079 |
| 1 | OC3P.1545.CB1_x_at | 231 | Yes | BST2 | Sense (Fully Exonic) | −0.0202 | 0.1606 |
| 1 | OCADNP.7474_s_at | 232 | Yes | CTSS | Sense (Fully Exonic) | 0.3166 | 0.4647 |
| 1 | OC3P.13144.C1-468a_s_at | 233 | Yes | HMHA1 | Sense (Fully Exonic) | 0.3289 | 0.3302 |
| 1 | OCADNP.3111_s_at | 234 | Yes | STAT1 | Sense (Includes Intronic) | 0.4544 | 0.5399 |
| 1 | OCRS2.2290_s_at | 235 | Yes | DGKA | Sense (Fully Exonic) | −0.0641 | −0.0057 |
| 1 | OC3P.77.C1_s_at | 236 | Yes | CTSB | Sense (Fully Exonic) | 0.0202 | 0.1147 |
| 1 | OCMX.2432.C4_s_at | 237 | Yes | CTSB | Sense (Fully Exonic) | 0.1490 | 0.1090 |
| 1 | OC3P.9251.C1_s_at | 238 | Yes | CD4 | Sense (Fully Exonic) | 0.0415 | 0.1595 |

[0014] The cancer sub-type may be defined by the probesets listed in Tables A and B and by the expression levels of the corresponding genes in Tables A and B, which may be measured using the probesets. Negative values are indicative of decreased (mean) expression levels and positive values of increased (mean) expression levels.

[0015] In a further aspect the invention provides a method for selecting whether to administer an anti-angiogenic therapeutic agent to a subject with cancer, comprising:

[0016] measuring the expression levels of at least 3 biomarkers in a sample from the subject,

[0017] wherein at least two of the biomarkers are from Table A and at least one of the biomarkers is from Table B and assessing from the expression levels of the biomarkers whether the cancer belongs to a cancer sub-type

[0018] (optionally) wherein the cancer sub-type is defined by the expression levels of the genes in Tables A and B

[0019] wherein if the cancer belongs to the sub-type an anti-angiogenic therapeutic agent is contraindicated

[0020] wherein the at least 3 biomarkers do not comprise at least two biomarkers selected from COL1A2, COL3A1, TIMP3, COL4A1, COL8A1, CDH11, TIMP2, ANGPTL2, and MMP14 and at least one biomarker selected from CIITA, XAF1 and CD74.

[0021] According to a further aspect of the invention there is provided a method for selecting whether to administer an anti-angiogenic therapeutic agent to a subject with cancer, comprising:

[0022] measuring the expression levels of at least 3 biomarkers in a sample from the subject,

[0023] wherein at least two of the biomarkers are from Table A and at least one of the biomarkers is from Table B and assessing from the expression levels of the biomarkers whether the cancer belongs to a cancer sub-type, wherein if the cancer belongs to the subtype the expression levels of the at least two biomarkers from Table A and the at least one biomarker from Table B are increased or decreased as defined for each biomarker in Table A and Table B (optionally) wherein the cancer sub-type is defined by the expression levels of the genes in Tables A and B

[0024] wherein if the cancer belongs to the sub-type an anti-angiogenic therapeutic agent is contraindicated.

[0025] In yet a further aspect, the present invention relates to a method for predicting the responsiveness of a subject with cancer to an anti-angiogenic therapeutic agent comprising:

[0026] allocating the cancer to a cancer sub-type by measuring the expression levels of at least 3 biomarkers in a sample from the subject, wherein at least two of the biomarkers are from Table A and at least one of the biomarkers is from Table B [IMMUNE LIST] and assessing from the expression levels of the biomarkers whether the cancer belongs to the sub-type (optionally) wherein the cancer sub-type is defined by the expression levels of the genes in Tables A and B

[0027] classifying the subject as responsive or non-responsive to the anti-angiogenic therapeutic agent on the basis of allocation to the subtype, wherein if the cancer belongs to the sub-type it is predicted to be non-responsive to the anti-angiogenic therapeutic agent

[0028] wherein the at least 3 biomarkers do not comprise at least two biomarkers selected from COL1A2, COL3A1, TIMP3, COL4A1, COL8A1, CDH11, TIMP2, ANGPTL2, and MMP14 and at least one biomarker selected from CIITA, XAF1 and CD74.

[0029] The invention also relates to a method for predicting the responsiveness of a subject with cancer to an anti-angiogenic therapeutic agent comprising:

[0030] allocating the cancer to a cancer sub-type by measuring the expression level of at least 3 biomarkers in a sample from the subject, wherein at least two of the biomarkers are from Table A and at least one of the biomarkers is from Table B and assessing from the expression levels of the biomarkers whether the cancer belongs to the sub-type wherein if the cancer belongs to the subtype the expression levels of the at least two biomarkers from Table A and the at least one biomarker from Table B are increased or decreased as defined for each biomarker in Table A and Table B

[0031] (optionally) wherein the cancer sub-type is defined by the expression levels of the genes in Tables A and B

[0032] classifying the subject as responsive or non-responsive to the anti-angiogenic therapeutic agent on the basis of allocation to the subtype, wherein if the cancer belongs to the sub-type it is predicted to be non-responsive to the anti-angiogenic therapeutic agent.

[0033] In a further aspect, the present invention relates to a method of determining clinical prognosis of a subject with cancer comprising:

[0034] measuring the expression level of at least 3 biomarkers in a sample from the subject,

[0035] wherein at least two of the biomarkers are from Table A and at least one of the biomarkers is from Table B and assessing from the expression levels of the biomarkers whether the cancer belongs to a cancer sub-type

[0036] (optionally) wherein the cancer sub-type is defined by the expression levels of the genes in Tables A and B

[0037] classifying the subject as having a good prognosis if the cancer belongs to the sub-type wherein the at least 3 biomarkers do not comprise at least two biomarkers selected from COL1A2, COL3A1, TIMP3, COL4A1, COL8A1, CDH11, TIMP2, ANGPTL2, and MMP14 and at least one biomarker selected from CIITA, XAF1 and CD74.

[0038] The invention also relates to a method of determining clinical prognosis of a subject with cancer comprising:

[0039] measuring the expression level of at least 3 biomarkers in a sample from the subject,

[0040] wherein at least two of the biomarkers are from Table A and at least one of the biomarkers is from Table B and assessing from the expression levels of the biomarkers whether the cancer belongs to a cancer sub-type wherein if the cancer belongs to the subtype the expression levels of the at least two biomarkers from Table A and the at least one biomarker from Table B are increased or decreased as defined for each biomarker in Table A and Table B

[0041] (optionally) wherein the cancer sub-type is defined by the expression levels of the genes in Tables A and B

[0042] classifying the subject as having a good prognosis if the cancer belongs to the sub-type.

[0043] In yet a further aspect, the present invention relates to a method for selecting whether to administer an anti-angiogenic therapeutic agent to a subject with cancer, comprising:

[0044] measuring the expression levels of at least 2 biomarkers in a sample from the subject and assessing from the expression levels of the biomarkers whether the cancer belongs to a cancer sub-type

[0045] (optionally) wherein the cancer sub-type is defined by the expression levels of the genes in Tables A and B

[0046] wherein if the cancer belongs to the sub-type an anti-angiogenic therapeutic agent is contraindicated

[0047] wherein the at least 2 biomarkers do not consist of from 1 to 63 of the biomarkers shown in Table C.

TABLE C

| GeneSymbol | GeneWeights | GeneBias |
|---|---|---|
| IGF2 | −0.01737 | 9.8884 |
| SOX11 | −0.01457 | 4.5276 |
| INS | −0.01409 | 7.0637 |
| CXCL17 | 0.012568 | 4.8478 |
| SLC5A1 | 0.012426 | 4.892 |
| TMEM45A | −0.0124 | 6.1307 |
| CXCR2P1 | 0.011427 | 3.1478 |
| MFAP2 | −0.01039 | 9.0516 |
| MATN3 | −0.01028 | 3.7313 |
| RTP4 | 0.010052 | 4.9852 |
| COL3A1 | −0.01002 | 8.413 |
| CDR1 | −0.00916 | 8.1778 |
| RARRES3 | 0.009056 | 6.8964 |
| TNFSF10 | 0.008876 | 6.2325 |
| NUAK1 | −0.0087 | 6.6771 |
| SNORD114-14 | −0.00864 | 5.6385 |
| SRPX | −0.00862 | 5.085 |
| SPARC | −0.00848 | 6.0135 |
| GJB1 | 0.008445 | 5.8142 |
| TIMP3 | −0.00823 | 6.5937 |
| ISLR | −0.0079 | 8.9876 |
| TUBA1A | −0.00754 | 9.654 |
| DEXI | 0.007271 | 5.5913 |
| BASP1 | −0.00724 | 8.4396 |
| PXDN | −0.00724 | 7.757 |
| GBP4 | 0.007226 | 3.1119 |
| SLC28A3 | 0.007201 | 4.2125 |
| HLA-DRA | 0.007197 | 8.3089 |
| TAP2 | 0.007189 | 4.8464 |
| ACSL5 | 0.007155 | 6.8703 |
| CDH11 | −0.00708 | 4.9925 |
| PSMB9 | 0.006962 | 4.1122 |
| MMP14 | −0.00683 | 10.1689 |
| CD74 | 0.006825 | 9.2707 |
| LOXL1 | −0.00676 | 9.6429 |
| CIITA | 0.006623 | 5.5396 |
| ZNF697 | −0.00658 | 7.0319 |
| SH3RF2 | 0.006549 | 5.0029 |
| MIR198 | −0.00654 | 5.1935 |
| COL1A2 | −0.00645 | 6.0427 |
| TNFRSF14 | 0.006421 | 9.0366 |
| COL8A1 | −0.00642 | 6.4565 |
| C21orf63 | 0.006261 | 5.9811 |
| TAP1 | 0.006215 | 8.6458 |
| PDPN | −0.00612 | 5.3198 |
| RHOBTB3 | −0.00597 | 3.5609 |
| BCL11A | 0.005943 | 4.3818 |
| HLA-DOB | 0.005851 | 4.6075 |
| XAF1 | 0.005742 | 7.9229 |
| ARHGAP26 | 0.005632 | 4.3991 |
| POLD2 | −0.00558 | 9.4183 |
| DPYSL2 | −0.00533 | 8.3469 |
| COL4A1 | −0.0052 | 7.0317 |
| ID3 | −0.00516 | 7.5673 |
| CFB | 0.005077 | 5.7951 |
| NID1 | −0.00494 | 4.7186 |
| FKBP7 | −0.00489 | 2.9437 |
| TIMP2 | −0.00468 | 7.5253 |
| RCBTB1 | −0.00458 | 7.4491 |
| ANGPTL2 | −0.00448 | 5.6807 |
| ENTPD7 | −0.00442 | 7.3772 |
| SHISA4 | −0.00403 | 6.0601 |
| HINT1 | 0.003651 | 6.0724 |

[0048] The genes from Table C are shown ranked in Table D and probesets that can be used to detect these genes are shown in Table E.

TABLE D

| Gene | Total Delta HR | Rank |
|---|---|---|
| IGF2 | 0.048910407 | 1 |
| CDR1 | 0.045335288 | 2 |
| COL3A1 | 0.044869217 | 3 |
| SPARC | 0.043434096 | 4 |
| TIMP3 | 0.042053053 | 5 |
| INS | 0.04013658 | 6 |
| COL8A1 | 0.026780907 | 7 |
| NUAK1 | 0.026752491 | 8 |
| MATN3 | 0.02402318 | 9 |
| TMEM45A | 0.016999761 | 10 |
| SRPX | 0.016372168 | 11 |
| CDH11 | 0.015604812 | 12 |
| MMP14 | 0.014583388 | 13 |
| LOXL1 | 0.010315358 | 14 |
| PXDN | 0.009728534 | 15 |
| COL1A2 | 0.009267887 | 16 |
| ANGPTL2 | 0.006071504 | 17 |
| POLD2 | 0.004297935 | 18 |
| NID1 | 0.00408724 | 19 |
| ISLR | 0.003014488 | 20 |
| SNORD114-14 | 0.002992636 | 21 |
| CXCR2P1 | 0.002804432 | 22 |
| MIR198 | 0.002173041 | 23 |
| BCL11A | 0.001258286 | 24 |
| PDPN | 0.000989109 | 25 |
| TNFRSF14 | 0.000132838 | 26 |
| ENTPD7 | 6.25143E−05 | 27 |
| HINT1 | −0.000113156 | 28 |
| TAP1 | −0.000379242 | 29 |
| ID3 | −0.000452476 | 30 |
| RCBTB1 | −0.000695459 | 31 |
| SOX11 | −0.001068812 | 32 |
| SHISA4 | −0.001470801 | 33 |
| COL4A1 | −0.001714442 | 34 |
| TUBA1A | −0.001817696 | 35 |
| TIMP2 | −0.004079263 | 36 |
| FKBP7 | −0.004575097 | 37 |
| TAP2 | −0.004597761 | 38 |
| TNFSF10 | −0.005307314 | 39 |
| ZNF697 | −0.007733496 | 40 |
| CIITA | −0.008785689 | 41 |
| BASP1 | −0.009340492 | 42 |
| XAF1 | −0.009760794 | 43 |
| DEXI | −0.009798099 | 44 |
| SH3RF2 | −0.009856754 | 45 |
| HLA-DOB | −0.009987248 | 46 |
| RHOBTB3 | −0.010264542 | 47 |
| GBP4 | −0.010747831 | 48 |
| DPYSL2 | −0.012042179 | 49 |
| ARHGAP26 | −0.012380203 | 50 |
| MFAP2 | −0.013981916 | 51 |
| CD74 | −0.016415304 | 52 |
| ACSL5 | −0.016912224 | 53 |
| SLC28A3 | −0.016996213 | 54 |
| GJB1 | −0.018395345 | 55 |
| C21orf63 | −0.019853038 | 56 |
| PSMB9 | −0.020314379 | 57 |
| HLA-DRA | −0.020436677 | 58 |
| CFB | −0.022202886 | 59 |
| RARRES3 | −0.034723666 | 60 |
| CXCL17 | −0.038523986 | 61 |
| SLC5A1 | −0.042034346 | 62 |
| RTP4 | −0.045259104 | 63 |

TABLE E

| Probeset | Gene | SEQ ID No. |
|---|---|---|
| OC3P.6916.C1_s_at | ACSL5 | 239 |
| OC3P.5381.C1_s_at | ACSL5 | 240 |
| OC3P.2679.C1_s_at | ANGPTL2 | 241 |
| ADXStrongB12_at | ANGPTL2 | N/A |
| OC3P.9834.C1_s_at | ANGPTL2 | 242 |
| OCMX.9546.C1_x_at | ANGPTL2 | 243 |
| OCADA.8226_s_at | ANGPTL2 | 244 |
| OCADNP.8811_s_at | ANGPTL2 | 245 |
| OCADA.3065_s_at | ARHGAP26 | 246 |
| OCADA.1272_s_at | ARHGAP26 | 247 |
| OC3SNGnh.16379_x_at | ARHGAP26 | 248 |
| OCMX.11710.C1_at | ARHGAP26 | 249 |
| OCADA.4396_s_at | ARHGAP26 | 250 |
| OC3P.15451.C1_at | ARHGAP26 | 251 |
| OC3SNGnh.16379_at | ARHGAP26 | 252 |
| OC3SNGnh.17316_s_at | ARHGAP26 | 253 |
| OCADA.964_s_at | ARHGAP26 | 254 |
| OC3SNGnh.6403_s_at | ARHGAP26 | 255 |
| OC3P.3912.C1_s_at | ARHGAP26 | 256 |
| OC3P.2419.C1_s_at | BASP1 | 257 |
| OCRS2.9952_s_at | BASP1 | 258 |
| OCRS2.9952_x_at | BASP1 | 259 |
| OCRS.854_s_at | BCL11A | 260 |
| OC3P.14938.C1_s_at | BCL11A | 261 |
| OCMX.12290.C1_at | BCL11A | 262 |
| OCADA.10230_s_at | BCL11A | 263 |
| OC3SNGnh.4343_at | BCL11A | 264 |
| OC3SNGnh.16766_x_at | BCL11A | 265 |
| OCMX.1680.C1_s_at | BCL11A | 266 |
| OC3P.14938.C1-334a_s_at | BCL11A | 267 |
| OCMX.12290.C1_x_at | BCL11A | 268 |
| OCADA.2850_s_at | BCL11A | 269 |
| OCADA.1135_s_at | C21orf63 | 270 |
| OCMX.14248.C1_s_at | C21orf63 | 271 |
| OC3P.14091.C1_s_at | C21orf63 | 272 |
| OC3P.14431.C1_s_at | C21orf63 | 273 |
| OCADA.8368_x_at | CD74 | 274 |
| OC3SNGnh.19144_s_at | CD74 | 275 |
| OC3P.104.CB1_x_at | CD74 | 276 |
| OCADNP.1805_s_at | CD74 | 277 |
| OC3SNG.3064-21a_x_at | CD74 | 278 |
| OC3P.14147.C1_s_at | CDH11 | 279 |
| OCADNP.10024_s_at | CDH11 | 280 |
| OCHP.148_s_at | CDH11 | 281 |
| OCADA.6210_s_at | CDH11 | 282 |
| OC3SNGnh.5056_x_at | CDH11 | 283 |
| OC3SNGnh.4032_s_at | CDH11 | 284 |
| OCHPRC.58_s_at | CDH11 | 285 |
| OCMX.1718.C1_s_at | CDH11 | 286 |
| OCADA.8067_x_at | CDH11 | 287 |
| OCADNP.8007_s_at | CDR1 | 288 |
| OC3P.295.C1_s_at | CFB | 289 |
| ADXStrongB56_at | CFB | N/A |
| OC3P.295.C2_x_at | CFB | 290 |
| OC3SNGnh.14167_at | CFB | 291 |
| OC3SNGn.5914-165a_s_at | CFB | 292 |
| OC3SNGn.970-10a_s_at | CFB | 293 |
| OCADNP.9683_s_at | CFB | 294 |
| OC3P.295.C2_at | CFB | 295 |
| OC3SNGnh.14167_s_at | CFB | 296 |
| OCADNP.17538_s_at | CIITA | 297 |
| OC3P.805.C1_s_at | CIITA | 298 |
| OCEM.1780_s_at | CIITA | 299 |
| OC3SNGnh.16892_s_at | CIITA | 300 |
| OCADA.6540_s_at | CIITA | 301 |
| OCHP.1927_s_at | CIITA | 302 |
| OC3SNGn.354-123a_s_at | CIITA | 303 |
| OC3SNGnh.4794_at | CIITA | 304 |
| OC3SNGn.8474-50a_x_at | COL1A2 | 305 |
| OCMX.184.C11_s_at | COL1A2 | 306 |
| OC3SNG.115-2502a_at | COL1A2 | 307 |
| OC3SNG.116-9169a_s_at | COL1A2 | 308 |
| OC3P.60.CB2_x_at | COL1A2 | 309 |
| OC3P.6454.C1_s_at | COL1A2 | 310 |
| OC3SNG.115-2502a_x_at | COL1A2 | 311 |
| OCMX.184.C16_x_at | COL1A2 | 312 |
| OCHP.173_x_at | COL1A2 | 313 |
| OC3P.60.CB1_x_at | COL1A2 | 314 |
| OC3SNGn.2538-539a_x_at | COL1A2 | 315 |
| OCMX.184.C16_s_at | COL1A2 | 316 |
| OCADNP.4048_s_at | COL3A1 | 317 |
| OC3P.81.CB2_s_at | COL3A1 | 318 |
| OC3SNGnh.19127_s_at | COL3A1 | 319 |
| OC3SNGn.1211-6a_s_at | COL3A1 | 320 |
| OCADNP.11975_s_at | COL4A1 | 321 |
| OC3P.850.C1-1145a_s_at | COL4A1 | 322 |
| OCHPRC.29_s_at | COL4A1 | 323 |
| OC3SNGnh.276_x_at | COL4A1 | 324 |
| OC3SNGnh.18844_at | COL8A1 | 325 |
| OC3P.1087.C1_s_at | COL8A1 | 326 |
| OC3P.13652.C1_s_at | COL8A1 | 327 |
| OCADNP.14932_s_at | COL8A1 | 328 |
| OC3P.10562.C1_s_at | COL8A1 | 329 |
| OCHPRC.94_s_at | CXCL17 | 330 |
| OC3SNG.3604-23a_at | CXCR2P1 | 331 |
| OC3SNG.3604-23a_x_at | CXCR2P1 | 332 |
| OC3SNGnh.13095_at | DEXI | 333 |
| OC3P.7366.C1_s_at | DEXI | 334 |
| OCADA.2531_s_at | DEXI | 335 |
| OC3SNGnh.3527_at | DEXI | 336 |
| OC3P.10489.C1_s_at | DEXI | 337 |
| OCADNP.10600_s_at | DEXI | 338 |
| OCADA.1911_s_at | DPYSL2 | 339 |
| OC3P.7322.C1_s_at | DPYSL2 | 340 |
| OC3SNG.366-35a_s_at | ENTPD7 | 341 |
| OC3SNGnh.5644_s_at | FKBP7 | 342 |
| OC3SNGnh.17831_at | FKBP7 | 343 |
| OCADNP.7326_s_at | FKBP7 | 344 |
| OC3P.12003.C1_x_at | FKBP7 | 345 |
| OC3P.4378.C1_s_at | GBP4 | 346 |
| OC3SNGnh.5459_s_at | GBP4 | 347 |
| OCADNP.3694_s_at | GBP4 | 348 |
| OC3SNG.3671-13a_s_at | GJB1 | 349 |
| 2874688_at | HINT1 | N/A |
| 2874689_at | HINT1 | N/A |
| Adx-200093_s_at | HINT1 | 350 |
| OC3SNGnh.5235_x_at | HINT1 | 351 |
| 2874702_at | HINT1 | N/A |
| 2874727_at | HINT1 | N/A |
| 200093_s_at | HINT1 | 352 |
| 2874697_at | HINT1 | N/A |
| 2874725_at | HINT1 | N/A |
| 2874696_at | HINT1 | N/A |
| 2874737_at | HINT1 | N/A |
| 2874735_at | HINT1 | N/A |
| Adx-200093-up_s_at | HINT1 | 353 |
| OC3P.14829.C1_s_at | HLA-DOB | 354 |
| ADXBad55_at | HLA-DOB | N/A |
| OC3P.674.C1_s_at | HLA-DRA | 355 |
| OCADNP.8307_s_at | HLA-DRA | 356 |
| OC3P.2407.C1_s_at | ID3 | 357 |
| ADXGood100_at | IGF2 | N/A |
| OC3SNG.899-20a_s_at | IGF2 | 358 |
| OC3SNGn.5728-103a_x_at | IGF2 | 360 |
| OC3P.4645.C1_s_at | IGF2 | 363 |
| OC3SNGnh.19773_s_at | IGF2 | 364 |
| OCADNP.10122_s_at | IGF2 | 365 |
| OCADNP.7400_s_at | IGF2 | 366 |
| ADXGood100_at | INS | N/A |
| OCADNP.17017_s_at | INS | 359 |
| OC3SNGn.5728-103a_x_at | INS | 360 |
| OCEM.2174_s_at | INS | 361 |
| OCEM.2035_x_at | INS | 362 |
| OC3P.4645.C1_s_at | INS | 363 |
| OC3SNGnh.19773_s_at | INS | 364 |
| OCADNP.10122_s_at | INS | 365 |
| OCADNP.7400_s_at | INS | 366 |
| OCEM.2035_at | INS | 367 |
| OC3P.9976.C1_x_at | ISLR | 368 |
| OCHP.1306_s_at | LOXL1 | 369 |
| OCADA.10621_s_at | MATN3 | 370 |
| OC3P.2576.C1_x_at | MFAP2 | 371 |
| OCHP.1079_s_at | MFAP2 | 372 |
| OC3P.11139.C1_s_at | MIR198 | 373 |
| OC3P.211.C1_x_at | MIR198 | 374 |
| ADXBad7_at | MIR198 | N/A |
| OCHP.462_s_at | MIR198 | 375 |
| OC3SNGn.8954-766a_s_at | MIR198 | 376 |
| OCADNP.4997_s_at | MIR198 | 377 |
| OCHP.228_s_at | MMP14 | 378 |
| OC3P.4123.C1_x_at | MMP14 | 379 |
| OC3P.4123.C1_s_at | MMP14 | 380 |
| OCADA.1433_x_at | NID1 | 381 |
| OCADNP.7347_s_at | NID1 | 382 |
| OC3P.3404.C1_s_at | NID1 | 383 |
| OC3SNGn.3328-664a_s_at | NID1 | 384 |
| OCADNP.9225_s_at | NUAK1 | 385 |
| ADXStrongB87_at | NUAK1 | N/A |
| OC3SNGn.2676-391a_s_at | NUAK1 | 386 |
| OCHPRC.111_s_at | PDPN | 387 |
| OCADNP.10047_s_at | PDPN | 388 |
| OCHPRC.96_s_at | PDPN | 389 |
| OC3P.13523.C1_s_at | PDPN | 390 |
| OC3SNG.4571-22a_x_at | POLD2 | 391 |
| OCEM.1126_s_at | POLD2 | 392 |
| ADXGood4_at | POLD2 | N/A |
| OC3SNGn.890-5a_s_at | POLD2 | 393 |
| OC3P.14770.C1_s_at | PSMB9 | 394 |
| OCRS.920_s_at | PSMB9 | 395 |
| OC3P.4627.C1_s_at | PSMB9 | 396 |
| OC3SNGnh.8187_at | PSMB9 | 397 |
| OCMX.15283.C1_x_at | PSMB9 | 398 |
| OCADNP.804_s_at | PSMB9 | 399 |
| OC3SNGnh.8187_x_at | PSMB9 | 400 |
| OCMX.14440.C1_x_at | PSMB9 | 401 |
| OC3P.1307.C1_s_at | PXDN | 402 |
| OC3P.8838.C1_s_at | PXDN | 403 |
| OCHP.1891_s_at | RARRES3 | 404 |
| OC3P.8963.C1_s_at | RCBTB1 | 405 |
| OC3SNGnh.6721_x_at | RHOBTB3 | 406 |
| OC3SNGnh.6912_x_at | RHOBTB3 | 407 |
| OC3SNGnh.957_s_at | RHOBTB3 | 408 |
| OC3SNG.2402-2883a_s_at | RHOBTB3 | 409 |
| OCHPRC.1436_at | RHOBTB3 | 410 |
| OC3SNGn.5382-76a_s_at | RHOBTB3 | 411 |
| OC3SNGnh.957_x_at | RHOBTB3 | 412 |
| OC3SNGnh.957_at | RHOBTB3 | 413 |
| OC3P.12862.C1_s_at | RHOBTB3 | 414 |
| OC3SNG.2401-1265a_x_at | RHOBTB3 | 415 |
| OC3P.5737.C1_s_at | RHOBTB3 | 416 |
| OCHP.1722_s_at | RTP4 | 417 |
| OC3P.9552.C1-496a_s_at | RTP4 | 418 |
| OC3P.9552.C1_x_at | RTP4 | 419 |
| OC3P.9552.C1_at | RTP4 | 420 |
| OC3SNGnh.865_s_at | SH3RF2 | 421 |
| OC3SNGnh.16695_s_at | SH3RF2 | 422 |
| OCADNP.12161_s_at | SH3RF2 | 423 |
| OC3SNGn.439-184a_s_at | SH3RF2 | 424 |
| OCHPRC.86_s_at | SH3RF2 | 425 |
| OCADNP.2340_s_at | SHISA4 | 426 |
| OC3SNG.6118-43a_s_at | SHISA4 | 427 |
| OCADNP.8940_s_at | SLC28A3 | 428 |
| OC3SNGnh.971_s_at | SLC28A3 | 429 |
| OCADA.4025_s_at | SLC28A3 | 430 |
| OC3P.9666.C1_s_at | SLC28A3 | 431 |
| OC3P.5726.C1_s_at | SLC5A1 | 432 |
| OCADNP.7872_s_at | SLC5A1 | 433 |
| OCRS2.10331_x_at | SNORD114-14 | 434 |
| OCRS2.8538_x_at | SNORD114-14 | 435 |
| OCRS2.10331_at | SNORD114-14 | 436 |
| OC3SNGn.2110-23a_s_at | SOX11 | 437 |
| OCHP.1171_s_at | SOX11 | 438 |
| OCHP.1523_s_at | SOX11 | 439 |
| OC3SNGnh.19157_x_at | SPARC | 440 |
| OCHP.508_s_at | SPARC | 441 |
| OC3P.148.CB1-990a_s_at | SPARC | 442 |
| OCEM.2143_at | SPARC | 443 |
| OC3SNG.2614-40a_s_at | SPARC | 444 |
| OC3P.148.CB1_x_at | SPARC | 445 |
| OCEM.2143_x_at | SPARC | 446 |
| OC3SNG.1657-20a_s_at | SRPX | 447 |
| ADXGoodB4_at | TAP1 | N/A |
| OC3SNG.2665-23a_s_at | TAP1 | 448 |
| OC3P.5602.C1_s_at | TAP2 | 449 |
| OCADNP.2260_s_at | TAP2 | 450 |
| OCADNP.8242_s_at | TAP2 | 451 |
| OC3SNGnh.18127_s_at | TAP2 | 452 |
| OC3P.14195.C1_s_at | TIMP2 | 453 |
| OCHP.320_s_at | TIMP2 | 454 |
| OC3P.543.CB1_x_at | TIMP2 | 455 |
| OC3SNGnh.19238_s_at | TIMP2 | 456 |
| OC3P.543.CB1-699a_s_at | TIMP2 | 457 |
| OCADNP.14191_s_at | TIMP2 | 458 |
| OCADNP.13017_s_at | TIMP3 | 459 |
| OCADA.9324_s_at | TIMP3 | 460 |
| OCHP.1200_s_at | TIMP3 | 461 |
| ADXGood73_at | TIMP3 | N/A |
| OC3P.10470.C1_s_at | TIMP3 | 462 |
| OC3P.15327.C1_at | TIMP3 | 463 |
| OCHP.112_s_at | TIMP3 | 464 |
| OC3P.5348.C1_s_at | TMEM45A | 465 |
| OC3P.4028.C1_at | TNFRSF14 | 466 |
| OC3SNGn.2230-103a_s_at | TNFRSF14 | 467 |
| OC3P.4028.C1_x_at | TNFRSF14 | 468 |
| OC3SNG.1683-90a_s_at | TNFSF10 | 469 |
| OC3P.2087.C1_s_at | TNFSF10 | 470 |
| OCHP.318_x_at | TNFSF10 | 471 |
| OC3SNGn.6279-343a_s_at | TNFSF10 | 472 |
| OC3SNGn.5842-826a_x_at | TNFSF10 | 473 |
| OCADNP.9180_s_at | TNFSF10 | 474 |
| OCHP.1136_s_at | TUBA1A | 475 |
| OCADNP.7771_s_at | XAF1 | 476 |
| ADXStrongB9_at | XAF1 | N/A |
| OC3SNG.2606-619a_x_at | XAF1 | 477 |
| OC3SNGnh.10895_at | XAF1 | 478 |
| OC3P.4873.C1_s_at | XAF1 | 479 |
| OC3SNGnh.10895_x_at | XAF1 | 480 |
| OC3SNG.2605-236a_x_at | XAF1 | 481 |
| OC3SNG.5460-81a_x_at | XAF1 | 482 |
| OCADA.154_s_at | ZNF697 | 483 |
| OCADA.3112_s_at | ZNF697 | 484 |

[0049] According to a further aspect of the invention there is provided a method for predicting the responsiveness of a subject with cancer to an anti-angiogenic therapeutic agent comprising: allocating the cancer to a cancer sub-type by measuring the expression levels of at least 2 biomarkers in a sample from the subject and assessing from the expression levels of the biomarkers whether the cancer belongs to the sub-type

[0050] (optionally) wherein the cancer sub-type is defined by the expression levels of the genes in Tables A and B

[0051] classifying the subject as responsive or non-responsive to the anti-angiogenic therapeutic agent on the basis of allocation to the subtype, wherein if the cancer belongs to the sub-type it is predicted to be non-responsive to the anti-angiogenic therapeutic agent

[0052] wherein the at least 2 biomarkers do not consist of from 1 to 63 of the biomarkers shown in Table C.

[0053] In yet a further aspect, the present invention relates to a method of determining clinical prognosis of a subject with cancer comprising:

[0054] measuring the expression levels of at least 2 biomarkers in a sample from the subject and assessing from the expression levels of the biomarkers whether the cancer belongs to a cancer sub-type

[0055] (optionally) wherein the cancer sub-type is defined by the expression levels of the genes in Tables A and B

[0056] classifying the subject as having a good prognosis if the cancer belongs to the sub-type wherein the at least 2 biomarkers do not consist of from 1 to 63 of the biomarkers shown in Table C.

[0057] According to all relevant aspects of the invention the subject (whose clinical prognosis is determined) is receiving, has received and/or will receive a standard chemotherapeutic treatment for the subject's cancer type and/or has not, is not and/or will not receive an anti-angiogenic therapeutic agent. In certain embodiments the standard chemotherapeutic treatment comprises, consists essentially of or consists of a platinum based-chemotherapeutic agent, a mitotic inhibitor, or a combination thereof. In specific embodiments the standard chemotherapeutic treatment comprises, consists essentially of or consists of carboplatin (or cisplatin) and/or paclitaxel.

[0058] Good prognosis may indicate increased progression free survival and/or overall survival rates and/or decreased likelihood of recurrence or metastasis compared to subjects with cancers that do not belong to the sub-type. Metastasis, or metastatic disease, is the spread of a cancer from one organ or part to another non-adjacent organ or part. The new occurrences of disease thus generated are referred to as metastases.

[0059] A therapeutic agent is “contraindicated” or “detrimental” to a patient if the cancer's rate of growth is accelerated as a result of contact with the therapeutic agent, compared to its growth in the absence of contact with the therapeutic agent and/or if the therapeutic agent is toxic to a patient. Growth of a cancer can be measured in a variety of ways. For instance, the size of a tumour, or measuring the expression of tumour markers appropriate for that tumour type. A therapeutic agent can also be considered “contraindicated” or “detrimental” if the patient's overall prognosis (progression free survival and/or overall survival) is reduced by the administration of the therapeutic agent.

[0060] A cancer is “responsive” to a therapeutic agent if its rate of growth is inhibited as a result of contact with the therapeutic agent, compared to its growth in the absence of contact with the therapeutic agent. Growth of a cancer can be measured in a variety of ways. For instance, the size of a tumor or measuring the expression of tumour markers appropriate for that tumour type. A cancer can also be considered responsive to a therapeutic agent if the patient's overall prognosis (progression free survival and/or overall survival) is improved by the administration of the therapeutic agent.

[0061] A cancer is “non-responsive” to a therapeutic agent if its rate of growth is not inhibited, or inhibited to a very low degree or to a non-statistically significant degree, as a result of contact with the therapeutic agent when compared to its growth in the absence of contact with the therapeutic agent. As stated above, growth of a cancer can be measured in a variety of ways, for instance, the size of a tumour or measuring the expression of tumour markers appropriate for that tumour type. A cancer can also be considered non-responsive to a therapeutic agent if the patient's overall prognosis (progression free survival and/or overall survival) is not improved by the administration of the therapeutic agent. Still further, measures of non-responsiveness can be assessed using additional criteria beyond growth size of a tumor such as, but not limited to, patient quality of life, and degree of metastases.

[0062] In a further aspect, the present invention relates to a method of treating cancer comprising administering a chemotherapeutic agent to a subject wherein the subject is selected for treatment on the basis of a method as described herein and wherein an anti-angiogenic therapeutic agent is not administered (if the cancer is determined to belong to the subtype).

[0063] The invention also relates to a method of treating cancer comprising administering a chemotherapeutic agent and not administering an anti-angiogenic therapeutic agent to a subject, wherein the subject has a cancer that has been determined to belong to a cancer sub-type, (optionally) wherein the cancer sub-type is defined by the expression levels of the genes in Tables A and B, by either:

[0064] (i) measuring the expression levels of at least 3 biomarkers in a sample from the subject,

[0065] wherein at least two of the biomarkers are from Table A and at least one of the biomarkers is from Table B and assessing from the expression levels of the biomarkers whether the cancer belongs to the cancer sub-type

[0066] wherein the at least 3 biomarkers do not comprise at least two biomarkers selected from COL1A2, COL3A1, TIMP3, COL4A1, COL8A1, CDH11, TIMP2, ANGPTL2, and MMP14 and at least one biomarker selected from CIITA, XAF1 and CD74; or

[0067] (ii) measuring the expression levels of at least 2 biomarkers in a sample from the subject and assessing from the expression levels of the biomarkers whether the cancer belongs to the cancer sub-type

[0068] wherein the at least 2 biomarkers do not consist of from 1 to 63 of the biomarkers shown in Table C.

[0069] According to a further aspect of the invention there is provided a chemotherapeutic agent for use in treating cancer in a subject wherein the subject is selected for treatment on the basis of a method as described herein and wherein the subject is not treated with an anti-angiogenic therapeutic agent (if the cancer is determined to belong to the subtype).

[0070] In yet a further aspect, the present invention relates to a chemotherapeutic agent for use in treating cancer in a subject wherein the subject has a cancer that has been determined to belong to a cancer sub-type, (optionally) wherein the cancer sub-type is defined by the expression levels of the genes in Tables A and B, by either:

[0071] (i) measuring the expression levels of at least 3 biomarkers in a sample from the subject, wherein at least two of the biomarkers are from Table A and at least one of the biomarkers is from Table B and assessing from the expression levels of the biomarkers whether the cancer belongs to the cancer sub-type

[0072] wherein the at least 3 biomarkers do not comprise at least two biomarkers selected from COL1A2, COL3A1, TIMP3, COL4A1, COL8A1, CDH11, TIMP2, ANGPTL2, and MMP14 and at least one biomarker selected from CIITA, XAF1 and CD74; or

[0073] (ii) measuring the expression levels of at least 2 biomarkers in a sample from the subject and assessing from the expression levels of the biomarkers whether the cancer belongs to the cancer sub-type

[0074] wherein the at least 2 biomarkers do not consist of from 1 to 63 of the biomarkers shown in Table C

[0075] and wherein the subject is not treated with an anti-angiogenic therapeutic agent.

[0076] The invention also relates to a method of treating cancer comprising administering a chemotherapeutic agent to a subject wherein the subject has a cancer that belongs to a cancer sub-type defined by the expression levels of the genes in Tables A and B and wherein an anti-angiogenic therapeutic agent is not administered.

[0077] In a further aspect, the present invention relates to a chemotherapeutic agent for use in treating cancer in a subject wherein the subject has a cancer that belongs to a cancer sub-type defined by the expression levels of the genes in Tables A and B and wherein the subject is not treated with an anti-angiogenic therapeutic agent.

[0078] According to all aspects of the invention the chemotherapeutic agent may comprise a platinum-based chemotherapeutic agent, an alkylating agent, an anti-metabolite (such as 5FU), an anti-tumour antibiotic, a topoisomerase inhibitor, a mitotic inhibitor, or a combination thereof. In certain embodiments the chemotherapeutic agent comprises a platinum based-chemotherapeutic agent, a mitotic inhibitor, or a combination thereof. In specific embodiments the chemotherapeutic agent comprises carboplatin and/or paclitaxel. The chemotherapeutic agent may reflect the standard of care treatment for the cancer. The standard of care treatment may differ for different types of cancer—for example, carboplatin in ovarian cancer, 5FU in colorectal cancer, platinum in head and neck cancer.

[0079] According to all aspects of the invention assessing whether the cancer belongs to the sub-type may comprise the use of classification trees.

[0080] According to all aspects of the invention assessing whether the cancer belongs to the sub-type may comprise:

[0081] determining a sample expression score for the biomarkers;

[0082] comparing the sample expression score to a threshold score; and

[0083] determining whether the sample expression score is above or

[0084] equal to or below the threshold expression score,

[0085] wherein if the sample expression score is above or equal to the threshold expression score the cancer belongs to the sub-type.

[0086] The sample expression score and threshold score may also be determined such that if the sample expression score is below or equal to the threshold expression score the cancer belongs to the sub-type.

[0087] “Expression levels” of biomarkers may be numerical values or directions of expression.

[0088] In certain embodiments the expression score is calculated using a weight value and/or a bias value for each biomarker. In specific embodiments the at least two biomarkers from Table A are weighted as 1/N where N is the number of biomarkers used from Table A and the at least one biomarker from Table B is weighted as 1/M where M is the number of biomarkers used from Table B.

[0089] As used herein, the term “weight” refers to the absolute magnitude of an item in a mathematical calculation. The weight of each biomarker in a gene expression classifier may be determined on a data set of patient samples using learning methods known in the art. As used herein the term “bias” or “offset” refers to a constant term derived using the mean or median expression of the signatures genes in a training set and is used to mean- or median-center each gene analyzed in the test dataset.

[0090] By expression score is meant a compound decision score that summarizes the expression levels of the biomarkers. This may be compared to a threshold score that is mathematically derived from a training set of patient data. The threshold score is established with the purpose of maximizing the ability to separate cancers into those that belong to the sub-type and those that do not. The patient training set data is preferably derived from cancer tissue samples having been characterized by sub-type, prognosis, likelihood of recurrence, long term survival, clinical outcome, treatment response, diagnosis, cancer classification, or personalized genomics profile. Expression profiles, and corresponding decision scores from patient samples may be correlated with the characteristics of patient samples in the training set that are on the same side of the mathematically derived score decision threshold. In certain example embodiments, the threshold of the (optionally linear) classifier scalar output is optimized to maximize the sum of sensitivity and specificity under cross-validation as observed within the training dataset.

[0091] The overall expression data for a given sample may be normalized using methods known to those skilled in the art in order to correct for differing amounts of starting material, varying efficiencies of the extraction and amplification reactions, etc.

[0092] In one embodiment, the biomarker expression levels in a sample are evaluated by a linear classifier. As used herein, a linear classifier refers to a weighted sum of the individual biomarker intensities into a compound decision score (“decision function”). The decision score is then compared to a pre-defined cut-off score threshold, corresponding to a certain set-point in terms of sensitivity and specificity which indicates if a sample is equal to or above the score threshold (decision function positive) or below (decision function negative).

[0093] Using a linear classifier on the normalized data to make a call (e.g. cancer belongs to the sub-type or not) effectively means to split the data space, i.e. all possible combinations of expression values for all genes in the classifier, into two disjoint segments by means of a separating hyperplane. This split is empirically derived on a large set of training examples. Without loss of generality, one can assume a certain fixed set of values for all but one biomarker, which would automatically define a threshold value for this remaining biomarker where the decision would change from, for example, belonging to the sub-type or not. The precise value of this threshold depends on the actual measured expression profile of all other biomarkers within the classifier, but the general indication of certain biomarkers remains fixed. Therefore, in the context of the overall gene expression classifier, relative expression can indicate if either up- or down-regulation of a certain biomarker is indicative of belonging to the sub-type or not. In certain example embodiments, a sample expression score above the threshold expression score indicates the cancer belongs to the subtype. In certain other example embodiments, a sample expression score above a threshold score indicates the subject has a good clinical prognosis compared to a subject with a sample expression score below the threshold score. In certain other example embodiments, a sample expression score above the threshold score indicates the subject has an increased relative risk of experiencing a detrimental effect, or having a poor prognosis, if an anti-angiogenic therapeutic agent is administered.

[0094] In certain embodiments the biomarkers used to assess whether the cancer belongs to the cancer sub-type do not comprise or consist of any one or more of the 63 biomarkers shown in Table C.

[0095] According to all aspects of the invention the cancer sub-type may be defined by increased and/or decreased expression levels of the genes listed in Tables A and B as shown in Tables A and B.

[0096] When a biomarker indicates or is a sign of an abnormal process, disease or other condition in an individual, that biomarker may be described as being either over-expressed or under-expressed or having an increased or decreased expression level as compared to an expression level or value of the biomarker that indicates or is a sign of a normal process, an absence of a disease or other condition in an individual. “Up-regulation”, “up-regulated”, “over-expression”, “over-expressed”, “increased expression” and any variations thereof are used interchangeably to refer to a value or level of a biomarker in a biological sample that is (statistically significantly) greater than a value or level (or range of values or levels) of the biomarker that is typically detected in similar biological samples from healthy or normal individuals. The terms may also refer to a value or level of a biomarker in a biological sample that is (statistically significantly) greater than a value or level (or range of values or levels) of the biomarker that may be detected at a different stage of a particular disease. The terms may also be used to refer to a value or level of biomarker in a biological sample that is (statistically significantly) greater than the average value or level of the biomarker that may be detected for samples of the same disease as a whole. For example, the level of biomarker may be (statistically significantly) greater than the average level for ovarian cancer samples, preferably serous ovarian cancer samples, more preferably high-grade serous ovarian cancer samples.

[0097] “Down-regulation”, “down-regulated”, “under-expression”, “under-expressed”, “decreased expression” and any variations thereof are used interchangeably to refer to a value or level of a biomarker in a biological sample that is (statistically significantly) less than a value or level (or range of values or levels) of the biomarker that is typically detected in similar biological samples from healthy or normal individuals. The terms may also refer to a value or level of a biomarker in a biological sample that is (statistically significantly) less than a value or level (or range of values or levels) of the biomarker that may be detected at a different stage of a particular disease. The terms may also be used to refer to a value or level of biomarker in a biological sample that is (statistically significantly) less than the average value or level of the biomarker that may be detected for samples of the same disease as a whole. For example, the level of biomarker may be (statistically significantly) less than the average level for ovarian cancer samples, preferably serous ovarian cancer samples, more preferably high-grade serous ovarian cancer samples.

[0098] Further, a biomarker that is either over-expressed or under-expressed can also be referred to as being “differentially expressed” or as having a “differential level” or “differential value” as compared to a “normal” expression level or value of the biomarker that indicates or is a sign of a normal process or an absence of a disease, disease subtype, or other condition in an individual. Thus, “differential expression” of a biomarker can also be referred to as a variation from a “normal” expression level of the biomarker.

[0099] The terms “differential biomarker expression” and “differential expression” are used interchangeably to refer to a biomarker whose expression is activated to a higher or lower level in a subject suffering from a specific disease, relative to its expression in a normal subject, or relative to its expression in a patient that responds differently to a particular therapy or has a different prognosis. The terms also include biomarkers whose expression is activated to a higher or lower level at different stages of the same disease. It is also understood that a differentially expressed biomarker may be either activated or inhibited at the nucleic acid level or protein level, or may be subject to alternative splicing to result in a different polypeptide product. Such differences may be evidenced by a variety of changes including mRNA levels, miRNA levels, antisense transcript levels, or protein surface expression, secretion or other partitioning of a polypeptide. Differential biomarker expression may include a comparison of expression between two or more genes or their gene products; or a comparison of the ratios of the expression between two or more genes or their gene products; or even a comparison of two differently processed products of the same gene, which differ between normal subjects and subjects suffering from a disease; or between various stages of the same disease. Differential expression includes both quantitative, as well as qualitative, differences in the temporal or cellular expression pattern in a biomarker among, for example, normal and diseased cells, or among cells which have undergone different disease events or disease stages.

[0100] In certain embodiments the subject is receiving, has received and/or will receive (optionally together with the anti-angiogenic therapeutic agent) treatment with a chemotherapeutic agent.

[0101] According to all aspects of the invention the method may further comprise obtaining a test sample from the subject. The methods may be vitro methods performed on an isolated sample.

[0102] According to all aspects of the invention samples may be of any suitable form including any material, biological fluid, tissue, or cell obtained or otherwise derived from an individual. In specific embodiments the sample comprises, consists essentially of or consists of a formalin-fixed paraffin-embedded biopsy sample. In further embodiments the sample comprises, consists essentially of or consists of a fresh/frozen (FF) sample. The sample may comprise, consist essentially of or consist of tumour (cancer) tissue, optionally ovarian tumour (cancer) tissue. The sample may comprise, consist essentially of or consist of tumour (cancer) cells, optionally ovarian tumour (cancer) cells. The sample may be obtained by any suitable technique. Examples include a biopsy procedure, optionally a fine needle aspirate biopsy procedure. Body fluid samples may also be utilised. Suitable sample types include blood (including whole blood, leukocytes, peripheral blood mononuclear cells, buffy coat, plasma, and serum), sputum, tears, mucus, nasal washes, nasal aspirate, breath, urine, semen, saliva, meningeal fluid, amniotic fluid, glandular fluid, lymph fluid, nipple aspirate, bronchial aspirate, synovial fluid, joint aspirate, ascites, cells, a cellular extract, and cerebrospinal fluid. This also includes experimentally separated fractions of all of the preceding. For example, a blood sample can be fractionated into serum or into fractions containing particular types of blood cells, such as red blood cells or white blood cells (leukocytes). If desired, a sample can be a combination of samples from an individual, such as a combination of a tissue and fluid sample. The term “sample” also includes materials containing homogenized solid material, such as from a stool sample, a tissue sample, or a tissue biopsy, for example. The term “sample” also includes materials derived from a tissue culture or a cell culture, including tissue resection and biopsy samples. Example methods for obtaining a sample include, e.g., phlebotomy, swab (e.g., buccal swab). Samples can also be collected, e.g., by micro dissection (e.g., laser capture micro dissection (LCM) or laser micro dissection (LMD)), bladder wash, smear (e.g., a PAP smear), or ductal lavage. A “sample” obtained or derived from an individual includes any such sample that has been processed in any suitable manner after being obtained from the individual. The methods of the invention as defined herein may begin with an obtained sample and thus do not necessarily (although they may) incorporate the step of obtaining the sample from the patient. As used herein, the term “patient” includes human and non-human animals. The preferred patient for treatment is a human. “Patient,” “individual” and “subject” are used interchangeably herein.

[0103] According to all aspects of the invention the cancer may be ovarian cancer,

[0104] peritoneal cancer or fallopian tube cancer. In certain embodiments the ovarian cancer is high grade serous ovarian cancer. The cancer may also be leukemia, brain cancer, glioblastoma prostate cancer, liver cancer, stomach cancer, colorectal cancer, colon cancer, thyroid cancer, neuroendocrine cancer, gastrointestinal stromal tumors (GIST), gastric cancer, lymphoma, throat cancer, breast cancer, skin cancer, melanoma, multiple myeloma, lung cancer, sarcoma, cervical cancer, testicular cancer, bladder cancer, endocrine cancer, endometrial cancer, esophageal cancer, glioma, lymphoma, neuroblastoma, osteosarcoma, pancreatic cancer, pituitary cancer, renal cancer, and the like. As used herein, colorectal cancer encompasses cancers that may involve cancer in tissues of both the rectum and other portions of the colon as well as cancers that may be individually classified as either colon cancer or rectal cancer.

[0105] In all aspects of the invention the anti-angiogenic therapeutic agent may be a VEGF-pathway-targeted therapeutic agent, an angiopoietin-TIE2 pathway inhibitor, an endogenous angiogenic inhibitor, or an immunomodulatory agent. In certain embodiments the VEGF pathway-targeted therapeutic agent is selected from Bevacizumab (Avastin), Aflibercept (VEGF Trap), IMC-1121B (Ramucirumab), Imatinib (Gleevec), Sorafenib (Nexavar), Gefitinib (Iressa), Sunitinib (Sutent), Erlotinib, Tivozinib, Cediranib (Recentin), Pazopanib (Votrient), BIBF 1120 (Vargatef), Dovitinib, Semaxanib (Sugen), Axitinib (AG013736), Vandetanib (Zactima), Nilotinib (Tasigna), Dasatinib (Sprycel), Vatalanib, Motesanib, ABT-869, TKI-258 or a combination thereof. The angiopoietin-TIE2 pathway inhibitor may be selected from AMG-386, PF-4856884 CVX-060, CEP-11981, CE-245677, MEDI-3617, CVX-241, Trastuzumab (Herceptin) or a combination thereof. In certain embodiments the endogenous angiogenic inhibitor is selected from Thombospondin, Endostatin, Tumstatin, Canstatin, Arrestin, Angiostatin, Vasostatin, Interferon alpha or a combination thereof. In further embodiments the immunomodulatory agent is selected from thalidomide and lenalidomide. In specific embodiments the VEGF pathway-targeted therapeutic agent is bevacizumab.

[0106] Accordingly, in a further aspect, the present invention relates to a method for selecting whether to administer Bevacizumab to a subject, comprising:

[0107] in a test sample obtained from a subject suffering from ovarian cancer, which subject is being, has been and/or will be treated using a platinum-based chemotherapeutic agent and/or a mitotic inhibitor;

[0108] measuring expression levels of at least 2 biomarkers;

[0109] determining a sample expression score for the 2 or more biomarkers;

[0110] comparing the sample expression score to a threshold score;

[0111] wherein if the sample expression score is above or equal to the threshold expression score the cancer belongs to a cancer sub-type defined by the expression levels of the genes in Tables A and B

[0112] selecting a treatment based on whether the cancer belongs to the sub-type, wherein if the cancer belongs to the sub-type Bevacizumab is contraindicated.

[0113] In certain embodiments if Bevacizumab is contraindicated the patient is and/or continues to be treated with a platinum-based chemotherapeutic agent and/or a mitotic inhibitor. In further embodiments if the cancer does not belong to the sub-type the patient is and/or continues to be treated with a platinum-based chemotherapeutic agent and/or a mitotic inhibitor together with Bevacizumab.

[0114] According to all aspects of the invention the method may comprise measuring the expression level of at least 3 biomarkers in a sample from the subject, wherein at least two of the biomarkers are from Table A and at least one of the biomarkers is from Table B.

[0115] The method may comprise measuring the expression levels of at least 4, 5, 6, 7, 8, 9, 10, 11, 12, 13, 14, 15, 16, 17, 18, 19, 20, 25, 30, 40, 50, 60, 70, 80, 90, 100, 110, 120 or each of the biomarkers from Table F. In certain embodiments the method may comprise measuring the expression levels of 4-20, preferably 4-15, more preferably 4-11 of the biomarkers from Table F. The inventors have shown that measuring the expression levels of at least 4 of the markers in Table F enables the subtype to be reliably detected.

TABLE F

| GeneSymbol | GeneWeights | GeneBias |
|---|---|---|
| UPK2 | −0.018035721 | 3.359991 |
| HLA-DPA1 | 0.015817304 | 5.777439 |
| GABRE | 0.014231336 | 4.945322 |
| KCND2 | 0.014177587 | 6.395784 |
| RPL23AP1 | 0.013258308 | 5.567101 |
| CLDN6 | −0.012995984 | 5.379913 |
| ST6GAL1 | 0.01287146 | 4.244109 |
| PKHD1L1 | 0.012741215 | 3.248153 |
| TMEM169 | −0.012606474 | 4.477176 |
| SECTM1 | 0.012507431 | 6.054561 |
| GBP3 | 0.012101898 | 5.97683 |
| HDHD1 | 0.010328046 | 5.533878 |
| APOBEC3G | 0.009738711 | 6.158638 |
| EIF2AK1 | −0.009557918 | 5.892837 |
| LRP8 | 0.009520369 | 3.493186 |
| KIF26A | −0.009387132 | 5.443061 |
| FAAH2 | 0.009074719 | 4.674146 |
| FAT4 | −0.009068276 | 3.220141 |
| RCAN2 | −0.008853666 | 4.772453 |
| IFI16 | 0.008775954 | 5.108484 |
| GBP1 | 0.00877032 | 5.336176 |
| LYRM7 | 0.008652914 | 6.816823 |
| GNAI1 | −0.008542682 | 7.209451 |
| DIS3L | 0.008481441 | 5.705728 |
| C20orf103 | −0.008457354 | 4.990673 |
| LY6E | 0.008385642 | 8.386388 |
| FIGN | −0.008364187 | 4.693932 |
| GSDMC | 0.008065541 | 4.880615 |
| LRRN4CL | −0.008011982 | 4.043768 |
| C10orf82 | −0.00786412 | 3.821355 |
| GLRX | −0.007725939 | 2.63047 |
| TXK | 0.007709943 | 3.368429 |
| SYTL4 | −0.007709867 | 4.018044 |
| C2orf88 | 0.007705706 | 5.990158 |
| PIGR | 0.00766774 | 5.910846 |
| DLL1 | −0.00765528 | 3.955139 |
| NXNL2 | 0.007564036 | 4.795136 |
| SLC44A4 | 0.007531574 | 6.082619 |
| SAMD9L | 0.007519146 | 5.679514 |
| FAM19A5 | −0.007481583 | 4.233516 |
| PARP14 | 0.007413434 | 6.95454 |
| EFNB3 | −0.007373074 | 5.0962 |
| CHI3L1 | 0.007198574 | 9.270811 |
| TCIRG1 | 0.007149493 | 7.692661 |
| WNT11 | −0.006953495 | 4.967626 |
| EHF | 0.006830876 | 6.295278 |
| CILP | −0.006827864 | 4.158272 |
| TMEM62 | 0.006801865 | 5.533521 |
| TMEM200A | −0.006757567 | 3.718522 |
| POU2F3 | 0.006721892 | 4.061305 |
| USP53 | 0.006591725 | 4.810373 |
| RDBP | 0.006481046 | 11.09852 |
| MTM1 | 0.006429026 | 5.424149 |
| PLSCR1 | 0.006420716 | 5.810762 |
| LRRN1 | −0.006346395 | 4.202345 |
| SP140L | 0.006193052 | 5.282879 |
| SNORD114-7 | −0.006137667 | 4.661787 |
| CCNJL | −0.006103292 | 5.896248 |
| LGALS9 | 0.006096398 | 7.231844 |
| LATS2 | −0.006081829 | 4.567592 |
| GPC2 | −0.006055543 | 6.943001 |
| GATA2 | −0.005830083 | 5.378733 |
| MIR1245 | −0.005762982 | 5.445651 |
| SERPINB1 | 0.005760253 | 5.612094 |
| ST6GAL2 | −0.005718803 | 3.692136 |
| P4HA1 | −0.005703193 | 6.366304 |
| FAM198B | −0.005497488 | 2.963395 |
| DLX5 | −0.005455726 | 4.488077 |
| SEMA3C | −0.005255281 | 5.740108 |
| FAM86A | 0.005123765 | 6.441416 |
| AEBP1 | −0.005066506 | 7.563053 |
| SLC26A10 | −0.005038618 | 5.723967 |
| MAT2B | 0.004967947 | 9.217941 |
| POC1B | 0.004866035 | 6.018808 |
| MYO1B | −0.004846194 | 3.763944 |
| TCF4 | −0.004810352 | 4.934118 |
| GPT | 0.004636147 | 6.287225 |
| FZD2 | −0.0046194 | 4.632028 |
| ASRGL1 | 0.004485953 | 5.341796 |
| CALU | −0.004468499 | 7.661819 |
| HTRA1 | −0.004463171 | 9.086012 |
| ENPP1 | −0.00443649 | 3.567087 |
| MRVI1 | −0.004434326 | 5.098207 |
| MEG3 | −0.004411079 | 7.374835 |
| TWIST1 | −0.00437896 | 7.413093 |
| C4orf31 | −0.00436173 | 3.646165 |
| DTX3L | 0.004098616 | 10.27099 |
| FAM101B | −0.004074778 | 4.69517 |
| APBA2 | −0.003973865 | 5.193996 |
| FAM86C | 0.003951991 | 6.177085 |
| NUDT10 | −0.003940655 | 3.632575 |
| S100A13 | 0.003886817 | 7.069111 |
| TC2N | 0.003875623 | 3.898429 |
| IGFBP4 | −0.003756434 | 7.755969 |
| PRICKLE2 | −0.003495233 | 6.465212 |
| KDM5B | −0.003484745 | 6.159924 |
| CYB5R3 | −0.003468881 | 11.07312 |
| PRKG1 | −0.003447485 | 3.123224 |
| PCOLCE | −0.003433563 | 6.611068 |
| PSME1 | 0.003417446 | 8.183136 |
| FAM101A | −0.003083221 | 5.370094 |
| UTP14A | 0.00296573 | 6.68806 |
| DACT3 | −0.002875519 | 5.333928 |
| C5orf13 | −0.002820432 | 6.823887 |
| CNPY4 | −0.002636714 | 6.331606 |
| MEIS3P1 | −0.002609561 | 6.576464 |
| COL10A1 | −0.002471957 | 6.413886 |
| BGN | −0.002395437 | 10.16321 |
| MN1 | −0.002369196 | 3.490203 |
| MMP2 | −0.002302352 | 5.442494 |
| ETV1 | −0.002266856 | 3.175207 |
| SLC22A17 | −0.002225371 | 6.628063 |
| MEIS3P2 | −0.002084583 | 5.814197 |
| FBLN2 | −0.001963851 | 6.566804 |
| LTBP2 | −0.001948347 | 8.741894 |
| COL1A1 | −0.001923836 | 10.56997 |
| MSRB3 | −0.001698388 | 3.001042 |
| NKD2 | 0.00152605 | 7.385352 |
| MFAP4 | −0.001422147 | 5.833216 |
| VCAN | −0.001290874 | 5.572734 |
| ZNF469 | −0.000451207 | 5.78573 |

[0116] The biomarkers from Table F are ranked in Table G from most important to least important based upon hazard ratio reduction when the genes are included versus when they are excluded. The genes/biomarkers may be selected for inclusion in a panel of biomarkers/a signature based on their ranking. Table H illustrates probesets that can be used to detect expression of the biomarkers.

TABLE G

| | Combined Delta | |
|---|---|---|
| Gene | HR | Rank |
| GABRE | 0.337359062 | 1 |
| HLA-DPA1 | 0.300256284 | 2 |
| CHI3L1 | 0.296360718 | 3 |
| KCND2 | 0.257226045 | 4 |
| GBP3 | 0.227046996 | 5 |
| UPK2 | 0.222007152 | 6 |
| SYTL4 | 0.211040547 | 7 |
| LRRN1 | 0.206205626 | 8 |
| USP53 | 0.154837732 | 9 |
| POU2F3 | 0.145576691 | 10 |
| IFI16 | 0.144743856 | 11 |
| GPT | 0.139488308 | 12 |
| SECTM1 | 0.131242036 | 13 |
| GBP1 | 0.127721221 | 14 |
| DLX5 | 0.116832218 | 15 |
| C4orf31 | 0.114744132 | 16 |
| DLL1 | 0.109780949 | 17 |
| EHF | 0.106293094 | 18 |
| SAMD9L | 0.104709676 | 19 |
| PLSCR1 | 0.104625768 | 20 |
| LY6E | 0.103280138 | 21 |
| EFNB3 | 0.101572355 | 22 |
| APOBEC3G | 0.087233468 | 23 |
| RPL23AP1 | 0.084711903 | 24 |
| GNAI1 | 0.081209911 | 25 |
| C20orf103 | 0.071107778 | 26 |
| DTX3L | 0.065552768 | 27 |
| MAT2B | 0.065475368 | 28 |
| CLDN6 | 0.062021901 | 29 |
| P4HA1 | 0.061878907 | 30 |
| SLC44A4 | 0.060350743 | 31 |
| FAT4 | 0.059503895 | 32 |
| LGALS9 | 0.056554956 | 33 |
| FAM19A5 | 0.056059383 | 34 |
| MTM1 | 0.050315972 | 35 |
| SLC26A10 | 0.049327133 | 36 |
| SP140L | 0.048168599 | 37 |
| SLC22A17 | 0.047816275 | 38 |
| FAM198B | 0.047192056 | 39 |
| CCNJL | 0.045558068 | 40 |
| NUDT10 | 0.044612641 | 41 |
| MEG3 | 0.044024878 | 42 |
| GATA2 | 0.043610514 | 43 |
| RDBP | 0.038861452 | 44 |
| EIF2AK1 | 0.037086703 | 45 |
| LYRM7 | 0.031769711 | 46 |
| PRICKLE2 | 0.031098441 | 47 |
| S100A13 | 0.030632337 | 48 |
| PSME1 | 0.029722311 | 49 |
| MYO1B | 0.028958889 | 50 |
| UTP14A | 0.024013078 | 51 |
| PARP14 | 0.023229799 | 52 |
| IGFBP4 | 0.021289533 | 53 |
| FZD2 | 0.021033055 | 54 |
| CALU | 0.020542261 | 55 |
| GPC2 | 0.017999692 | 56 |
| C10orf82 | 0.015198024 | 57 |
| GSDMC | 0.015070219 | 58 |
| CYB5R3 | 0.011241468 | 59 |
| TCIRG1 | 0.010154223 | 60 |
| APBA2 | 0.008802409 | 61 |
| ST6GAL1 | 0.008747796 | 62 |
| CNPY4 | 0.008020809 | 63 |
| FAM101B | 0.0055168 | 64 |
| KDM5B | 0.005118183 | 65 |
| SERPINB1 | 0.005078998 | 66 |
| PIGR | 0.004839196 | 67 |
| PKHD1L1 | 2.51362E−05 | 68 |
| POC1B | −0.00076447 | 69 |
| FAM86A | −0.010246498 | 70 |
| FIGN | −0.010303757 | 71 |
| ASRGL1 | −0.016190261 | 72 |
| FAM86C | −0.017669256 | 73 |
| SNORD114-7 | −0.018123626 | 74 |
| TXK | −0.018325835 | 75 |
| NXNL2 | −0.018378062 | 76 |
| TC2N | −0.020647383 | 77 |
| LATS2 | −0.022701806 | 78 |
| TCF4 | −0.026124482 | 79 |
| TMEM62 | −0.033738079 | 80 |
| PCOLCE | −0.034311272 | 81 |
| ETV1 | −0.037268287 | 82 |
| DIS3L | −0.038288521 | 83 |
| HTRA1 | −0.045043294 | 84 |
| MSRB3 | −0.046398147 | 85 |
| TMEM169 | −0.047281991 | 86 |
| HDHD1 | −0.055954287 | 87 |
| C5orf13 | −0.058378337 | 88 |
| MEIS3P1 | −0.059584725 | 89 |
| GLRX | −0.059644388 | 90 |
| LRRN4CL | −0.060202172 | 91 |
| LTBP2 | −0.060491887 | 92 |
| LRP8 | −0.062812677 | 93 |
| AEBP1 | −0.067344525 | 94 |
| RCAN2 | −0.076520381 | 95 |
| KIF26A | −0.077150316 | 96 |
| MEIS3P2 | −0.082183776 | 97 |
| MFAP4 | −0.087999078 | 98 |
| SEMA3C | −0.089439853 | 99 |
| FAAH2 | −0.10199233 | 100 |
| FBLN2 | −0.10238978 | 101 |
| MRVI1 | −0.104468956 | 102 |
| TWIST1 | −0.105178179 | 103 |
| DACT3 | −0.113122024 | 104 |
| PRKG1 | −0.114727895 | 105 |
| BGN | −0.123157122 | 106 |
| TMEM200A | −0.123401993 | 107 |
| ZNF469 | −0.137897067 | 108 |
| FAM101A | −0.152538637 | 109 |
| WNT11 | −0.153828906 | 110 |
| ENPP1 | −0.171279236 | 111 |
| NKD2 | −0.183893488 | 112 |
| MN1 | −0.191802042 | 113 |
| C2orf88 | −0.209518103 | 114 |
| CILP | −0.222557009 | 115 |
| COL1A1 | −0.225250378 | 116 |
| MMP2 | −0.24991078 | 117 |
| ST6GAL2 | −0.294860786 | 118 |
| COL10A1 | −0.303286192 | 119 |
| VCAN | −0.325923129 | 120 |
| MIR1245 | −0.379590501 | 121 |

TABLE H

| Probeset | Gene | SEQ ID No. |
|---|---|---|
| OCMXSNG.5475_at | AEBP1 | 485 |
| OCMXSNG.2603_at | AEBP1 | 486 |
| ADXStrongB47_at | AEBP1 | N/A |
| OCHP.1649_s_at | AEBP1 | 487 |
| OC3P.3458.C1_s_at | AEBP1 | 488 |
| ADXStrongB42_at | AEBP1 | N/A |
| OCMXSNG.5474_at | AEBP1 | 489 |
| OCMXSNG.5474_x_at | AEBP1 | 490 |
| OCHP.1147_s_at | APBA2 | 491 |
| OC3P.3328.C1_s_at | APBA2 | 492 |
| OCADA.11807_s_at | APBA2 | 493 |
| OC3SNG.5308-20a_s_at | APOBEC3G | 494 |
| OCADNP.16260_s_at | APOBEC3G | 495 |
| OCMX.6106.C2_at | ASRGL1 | 496 |
| OC3SNGnh.20113_s_at | ASRGL1 | 497 |
| OC3SNGnh.15728_x_at | ASRGL1 | 498 |
| OCHPRC.72_s_at | ASRGL1 | 499 |
| OC3P.7460.C1_s_at | ASRGL1 | 500 |
| OC3P.13249.C2_x_at | ASRGL1 | 501 |
| OC3SNGnh.20112_s_at | ASRGL1 | 502 |
| ADXGood55_at | ASRGL1 | N/A |
| OC3P.13249.C2_s_at | ASRGL1 | 503 |
| OC3SNGnh.20112_x_at | ASRGL1 | 504 |
| OCHP.937_s_at | BGN | 505 |
| OCADNP.9883_s_at | BGN | 506 |
| ADXStrong61_at | BGN | N/A |
| OCADNP.5820_s_at | C10orf82 | 507 |
| OC3SNGnh.6274_s_at | C10orf82 | 508 |
| OC3P.7546.C1_s_at | C20orf103 | 509 |
| OC3P.6691.C1_x_at | C2orf88 | 510 |
| OC3SNGn.3209-1053a_s_at | C2orf88 | 511 |
| OC3P.1793.C1_s_at | C2orf88 | 512 |
| OC3SNGnh.6041_x_at | C2orf88 | 513 |
| OCADA.11194_s_at | C2orf88 | 514 |
| OCRS2.1788_s_at | C2orf88 | 515 |
| OC3SNG.2094-40a_s_at | C4orf31 | 516 |
| OC3SNGn.377-427a_s_at | C4orf31 | 517 |
| OC3P.3548.C2_s_at | C5orf13 | 518 |
| OCADNP.9115_s_at | C5orf13 | 519 |
| OCADNP.14721_s_at | C5orf13 | 520 |
| OC3SNGn.2096-734a_s_at | C5orf13 | 521 |
| OCADA.5808_s_at | C5orf13 | 522 |
| OCADNP.11684_s_at | C5orf13 | 523 |
| ADXGood25_at | CALU | N/A |
| OC3SNGnh.9873_s_at | CALU | 524 |
| OC3SNG.123-901a_s_at | CALU | 525 |
| OCADNP.14456_x_at | CALU | 526 |
| OC3P.2001.C2-449a_s_at | CALU | 527 |
| OCADNP.7231_s_at | CALU | 528 |
| OC3SNGnh.11073_x_at | CALU | 529 |
| OC3P.13898.C1_s_at | CALU | 530 |
| OCHP.1141_s_at | CALU | 531 |
| OCADNP.3994_s_at | CALU | 532 |
| OC3P.12365.C1_s_at | CCNJL | 533 |
| OCHP.1872_s_at | CHI3L1 | 534 |
| OCRS.342_at | CILP | 535 |
| OC3P.12218.C1_s_at | CILP | 536 |
| OCHPRC.81_x_at | CLDN6 | 537 |
| OCRS2.7326_x_at | CLDN6 | 538 |
| OC3SNG.2953-20a_x_at | CLDN6 | 539 |
| OCADNP.9501_s_at | CLDN6 | 540 |
| OCRS2.3430_at | CNPY4 | 541 |
| OC3P.12351.C1_s_at | CNPY4 | 542 |
| OCRS.383_s_at | COL10A1 | 543 |
| OC3SNG.1834-947a_s_at | COL10A1 | 544 |
| OC3SNG.3967-1156a_x_at | COL1A1 | 545 |
| OC3P.162.C1_x_at | COL1A1 | 546 |
| OC3SNGnh.2873_x_at | COL1A1 | 547 |
| OCADNP.2115_s_at | COL1A1 | 548 |
| OC3P.354.CB1_s_at | COL1A1 | 549 |
| OC3P.162.C3_x_at | COL1A1 | 550 |
| OC3P.1226.C1_s_at | CYB5R3 | 551 |
| ADXStrong34_at | CYB5R3 | N/A |
| OCEM.1219_s_at | CYB5R3 | 552 |
| OC3SNG.3685-20a_s_at | DACT3 | 553 |
| OC3P.7775.C1_s_at | DIS3L | 554 |
| OC3SNGn.1174-202a_x_at | DIS3L | 555 |
| OC3P.8771.C1_s_at | DLL1 | 556 |
| OC3P.14576.C1_s_at | DLX5 | 557 |
| OC3P.3528.C1_s_at | DTX3L | 558 |
| OCRS.1427_s_at | DTX3L | 559 |
| OCADNP.8516_s_at | EFNB3 | 560 |
| OC3P.9384.C1_s_at | EFNB3 | 561 |
| ADXBad27_at | EHF | N/A |
| OCHPRC.60_s_at | EHF | 562 |
| OC3P.3119.C1-342a_s_at | EHF | 563 |
| OCADNP.10217_s_at | EHF | 564 |
| OC3SNGn.2971-1016a_s_at | EHF | 565 |
| OCHP.22_s_at | EHF | 566 |
| OCMX.12473.C1_s_at | EHF | 567 |
| OCRS.1860_s_at | EHF | 568 |
| OC3P.6113.C1_s_at | EHF | 569 |
| OC3SNGnh.4034_s_at | EHF | 570 |
| ADXStrongB91_at | EHF | N/A |
| ADXBad43_at | EHF | N/A |
| OCADA.6511_s_at | EHF | 571 |
| OCMX5NG.5461_s_at | EIF2AK1 | 572 |
| OC3SNGnh.14331_x_at | EIF2AK1 | 573 |
| OC3P.301.C1_s_at | EIF2AK1 | 574 |
| OC3P.2826.C1_s_at | EIF2AK1 | 575 |
| OC3P.2826.C1-632a_s_at | EIF2AK1 | 576 |
| OCADNP.2363_s_at | ENPP1 | 577 |
| OCADA.8789_s_at | ENPP1 | 578 |
| OCHP.1084_s_at | ENPP1 | 579 |
| OCADA.3370_s_at | ENPP1 | 580 |
| OCADA.6389_s_at | ETV1 | 581 |
| OCADNP.4628_s_at | ETV1 | 582 |
| OC3SNG.2163-2941a_s_at | ETV1 | 583 |
| OCADNP.7847_s_at | ETV1 | 584 |
| OCRS.1862_s_at | ETV1 | 585 |
| OC3SNGn.480-2043a_s_at | ETV1 | 586 |
| OCADNP.5347_s_at | ETV1 | 587 |
| OC3SNGnh.18545_at | FAAH2 | 588 |
| OC3SNGnh.18545_x_at | FAAH2 | 589 |
| OCMXSNG.4800_x_at | FAAH2 | 590 |
| OC3SNGnh.14393_x_at | FAAH2 | 591 |
| OC3SNGnh.13606_x_at | FAAH2 | 592 |
| OC3SNGnh.14393_at | FAAH2 | 593 |
| OC3SNG.6004-30a_s_at | FAAH2 | 594 |
| OC3P.4839.C1_s_at | FAM101A | 595 |
| ADXUglyB43_at | FAM101A | N/A |
| OC3P.8169.C1_s_at | FAM101B | 596 |
| OCRS2.566_s_at | FAM101B | 597 |
| OC3P.9099.C1_s_at | FAM101B | 598 |
| OC3SNGn.7559-1580a_at | FAM198B | 599 |
| OC3P.6417.C1_s_at | FAM198B | 600 |
| OCRS2.4931_s_at | FAM198B | 601 |
| OCADA.10843_s_at | FAM198B | 602 |
| OCADA.5341_s_at | FAM19A5 | 603 |
| OC3P.13915.C1_s_at | FAM19A5 | 604 |
| OC3P.14112.C1_s_at | FAM19A5 | 605 |
| OC3SNGnh.2090_x_at | FAM86A | 607 |
| OC3P.2572.C4_s_at | FAM86A | 608 |
| OCRS2.951_x_at | FAM86A | 606 |
| OC3SNGnh.2090_x_at | FAM86C | 607 |
| OC3P.2572.C4_s_at | FAM86C | 608 |
| OC3SNG.4266-25a_s_at | FAT4 | 609 |
| OC3SNG.1815-80a_s_at | FBLN2 | 610 |
| OCHP.1078_s_at | FBLN2 | 611 |
| OCADA.6796_s_at | FIGN | 612 |
| OC3P.15318.C1_at | FIGN | 613 |
| OCADA.6194_s_at | FIGN | 614 |
| OCADA.2860_s_at | FIGN | 615 |
| OCADNP.12019_s_at | FIGN | 616 |
| OC3P.15266.C1_x_at | FIGN | 617 |
| OC3P.7321.C1_s_at | FZD2 | 618 |
| ADXBad26_at | FZD2 | N/A |
| OC3P.7321.C1_x_at | FZD2 | 619 |
| OC3P.7321.C1_at | FZD2 | 620 |
| OC3P.6165.C1_s_at | GABRE | 621 |
| OC3SNGn.6359-34a_s_at | GABRE | 622 |
| OC3SNGn.6583-10627a_at | GABRE | 623 |
| OC3SNGn.6583-10627a_x_at | GABRE | 624 |
| OCMX.833.C13_s_at | GABRE | 625 |
| OCADA.11121_s_at | GATA2 | 626 |
| OCADA.3908_s_at | GATA2 | 627 |
| OCADNP.1974_s_at | GBP1 | 628 |
| OCADNP.2962_s_at | GBP1 | 629 |
| OCHP.1438_x_at | GBP1 | 630 |
| OCRS2.4406_x_at | GBP1 | 631 |
| OCADA.10565_s_at | GBP1 | 632 |
| OC3P.1927.C1_x_at | GBP1 | 633 |
| OC3SNGnh.19643_x_at | GBP3 | 634 |
| OC3SNGnh.19644_x_at | GBP3 | 635 |
| OC3P.1927.C2_s_at | GBP3 | 636 |
| OCMX.605.C1_at | GLRX | 637 |
| OCHP.1436_s_at | GLRX | 638 |
| OCMX.605.C1_x_at | GLRX | 639 |
| OC3SNGnh.7530_at | GLRX | 640 |
| OCMX.606.C1_s_at | GLRX | 641 |
| OC3SNGnh.7530_x_at | GLRX | 642 |
| OCADNP.8335_s_at | GLRX | 643 |
| OCMX.606.C1_at | GLRX | 644 |
| OCRS2.6438_s_at | GNAI1 | 645 |
| OC3P.1142.C1_s_at | GNAI1 | 646 |
| ADXGood98_at | GNAI1 | N/A |
| OC3SNG.3351-135a_s_at | GPC2 | 647 |
| OC3SNG.5195-46a_s_at | GPT | 648 |
| OC3SNG.5195-46a_x_at | GPT | 649 |
| OC3P.9125.C1_s_at | GSDMC | 650 |
| OCADA.4167_s_at | HDHD1 | 651 |
| OC3SNGnh.18826_at | HDHD1 | 652 |
| OC3P.7901.C1_s_at | HDHD1 | 653 |
| OC3P.2028.C1_s_at | HLA-DPA1 | 654 |
| ADXUglyB19_at | HLA-DPA1 | N/A |
| OC3SNGn.2735-12a_s_at | HLA-DPA1 | 655 |
| OCHP.902_s_at | HTRA1 | 656 |
| OC3SNGn.4796-28001a_s_at | IFI16 | 657 |
| OC3SNG.2113-18a_s_at | IFI16 | 658 |
| OC3SNGn.6068-1286a_s_at | IFI16 | 659 |
| OC3SNGn.4797-39932a_s_at | IFI16 | 660 |
| OCADNP.5197_s_at | IGFBP4 | 661 |
| OC3SNG.5134-22a_s_at | IGFBP4 | 662 |
| OC3SNGnh.6036_s_at | IGFBP4 | 663 |
| ADXStrongB37_at | IGFBP4 | N/A |
| OCADNP.7979_s_at | KCND2 | 664 |
| OCEM.617_s_at | KCND2 | 665 |
| OCMX.2694.C1_s_at | KDM5B | 666 |
| OC3P.7187.C1_s_at | KDM5B | 667 |
| OCADA.11372_s_at | KDM5B | 668 |
| OCEM.1229_at | KDM5B | 669 |
| OC3P.13885.C1_s_at | KIF26A | 670 |
| OCADNP.7032_s_at | LATS2 | 671 |
| OCADA.9355_s_at | LATS2 | 672 |
| OC3P.13211.C1_s_at | LATS2 | 673 |
| OCADA.7506_s_at | LATS2 | 674 |
| OCEM.59_x_at | LGALS9 | 675 |
| OC3P.1033.C1_s_at | LGALS9 | 676 |
| OC3SNGnh.10517_at | LRP8 | 677 |
| OCADA.11886_s_at | LRP8 | 678 |
| OCADA.11978_s_at | LRP8 | 679 |
| OC3P.8630.C1_s_at | LRP8 | 680 |
| OC3SNGnh.10517_at | LRP8 | 681 |
| OCADNP.9495_s_at | LRP8 | 682 |
| OCADNP.5625_s_at | LRRN1 | 683 |
| OCRS2.6196_at | LRRN1 | 684 |
| OC3SNGn.971-6a_at | LRRN1 | 685 |
| OC3SNG.5795-17a_s_at | LRRN4CL | 686 |
| OCADA.663_s_at | LRRN4CL | 687 |
| OCHP.1105_s_at | LTBP2 | 688 |
| OC3P.5700.C1_s_at | LTBP2 | 689 |
| OCMX.3091.C3_s_at | LY6E | 690 |
| OC3SNG.1862-17a_s_at | LY6E | 691 |
| OC3P.177.C1_s_at | LY6E | 692 |
| OC3SNGn.300-11a_s_at | LYRM7 | 693 |
| OC3SNG.5278-785a_x_at | LYRM7 | 694 |
| ADXGood103_at | LYRM7 | N/A |
| OC3SNGnh.8177_x_at | LYRM7 | 695 |
| OC3SNG.2044-750a_s_at | LYRM7 | 696 |
| OC3P.5073.C1_s_at | MAT2B | 697 |
| OC3P.5073.C1_x_at | MAT2B | 698 |
| OC3P.13642.C1_s_at | MEG3 | 699 |
| OCADNP.10552_s_at | MEG3 | 700 |
| OCADA.3017_s_at | MEG3 | 701 |
| OC3P.9532.C1_s_at | MEG3 | 702 |
| OC3SNGn.3096-5a_s_at | MEG3 | 703 |
| OCADNP.14835_s_at | MEG3 | 704 |
| OC3SNGn.3208-51a_s_at | MEG3 | 705 |
| OC3SNGnh.10745_x_at | MEG3 | 706 |
| OCADNP.12059_s_at | MEG3 | 707 |
| OC3P.3104.C1_s_at | MEIS3P1 | 709 |
| OC3P.12137.C1_x_at | MEIS3P1 | 708 |
| OC3P.3104.C1_s_at | MEIS3P2 | 709 |
| OCADNP.11373_x_at | MEIS3P2 | 710 |
| OC3P.4714.C1_at | MFAP4 | 711 |
| OC3SNG.2440-25a_s_at | MFAP4 | 712 |
| OCMX.8836.C3_x_at | MFAP4 | 713 |
| OC3SNGnh.3422_s_at | MIR1245 | 714 |
| OC3P.1163.C3_s_at | MMP2 | 715 |
| OCHP.374_s_at | MMP2 | 716 |
| OCADNP.7251_s_at | MMP2 | 717 |
| OCADA.2310_s_at | MMP2 | 718 |
| OC35NGnh.2965_x_at | MN1 | 719 |
| OCRS2.6707_x_at | MN1 | 720 |
| OC3P.8382.C1_x_at | MN1 | 721 |
| OC3SNGnh.7844_at | MN1 | 722 |
| OCADA.3580_s_at | MRVI1 | 723 |
| OC3P.1058.C1_s_at | MRVI1 | 724 |
| OC3P.13126.C1_s_at | MRVI1 | 725 |
| OCADNP.10237_s_at | MRVI1 | 726 |
| OC3P.12965.C1_x_at | MSRB3 | 727 |
| OCADA.2263_s_at | MSRB3 | 728 |
| OC3SNGn.2476-2808a_s_at | MSRB3 | 729 |
| OC3P.12245.C1_s_at | MSRB3 | 730 |
| OC3SNGn.2475-1707a_s_at | MSRB3 | 731 |
| OCADA.215_s_at | MSRB3 | 732 |
| OCEM.2176_at | MTM1 | 733 |
| OC3P.7705.C1_s_at | MTM1 | 734 |
| OCADA.7806_x_at | MTM1 | 735 |
| OC3SNGnh.16755_at | MYO1B | 736 |
| OC3SNGn.2539-1215a_s_at | MYO1B | 737 |
| OC3P.4399.C1_x_at | MYO1B | 738 |
| OC3SNGn.8543-1096a_s_at | MYO1B | 739 |
| OCADNP.12332_x_at | MYO1B | 740 |
| OCADNP.5849_s_at | NKD2 | 741 |
| OCRS.1038_x_at | NUDT10 | 742 |
| OCMX.1935.C2_x_at | NUDT10 | 743 |
| OCADNP.5059_s_at | NUDT10 | 744 |
| OCRS.1038_at | NUDT10 | 745 |
| OCADA.81_x_at | NXNL2 | 746 |
| OC3SNGnh.3578_s_at | NXNL2 | 747 |
| OC3P.6323.C1-387a_s_at | P4HA1 | 748 |
| OC3SNG.2842-16a_s_at | P4HA1 | 749 |
| OC3SNGnh.5686_x_at | P4HA1 | 750 |
| OC3P.577.C3_x_at | P4HA1 | 751 |
| OC3SNGnh.14212_at | P4HA1 | 752 |
| OC3SNGnh.2575_s_at | PARP14 | 753 |
| OC3P.3721.C1_s_at | PARP14 | 754 |
| OCEM.1594_s_at | PARP14 | 755 |
| OC3P.11978.C1_s_at | PARP14 | 756 |
| ADXUglyB44_at | PARP14 | N/A |
| OC3SNGnh.4719_x_at | PARP14 | 757 |
| OCRS2.3088_s_at | PCOLCE | 758 |
| OC3P.5048.C1_s_at | PCOLCE | 759 |
| OCMXSNG.2345_s_at | PCOLCE | 760 |
| ADXStrong15_at | PIGR | N/A |
| OCHPRC.55_s_at | PIGR | 761 |
| OCADNP.7555_s_at | PIGR | 762 |
| ADXBad46_at | PIGR | N/A |
| OC3P.5246.C1_s_at | PKHD1L1 | 763 |
| OCRS2.2200_s_at | PKHD1L1 | 764 |
| OC3SNGnh.1242_x_at | PKHD1L1 | 765 |
| OCHP.105_s_at | PKHD1L1 | 766 |
| OCADNP.15163_s_at | PKHD1L1 | 767 |
| OCADNP.5491_s_at | PLSCR1 | 768 |
| OCHP.484_s_at | PLSCR1 | 769 |
| OC3P.343.C1-620a_s_at | PLSCR1 | 770 |
| OCADA.9243_s_at | PLSCR1 | 771 |
| OC3P.12249.C1_s_at | POC1B | 772 |
| OCADNP.8935_s_at | POC1B | 773 |
| OC3SNGn.2327-2492a_s_at | POC1B | 774 |
| OC3P.324.C1_x_at | POC1B | 775 |
| ADXUglyB39_at | POU2F3 | N/A |
| OCADA.9784_s_at | POU2F3 | 776 |
| OCADA.8436_s_at | POU2F3 | 777 |
| OCADNP.16713_x_at | POU2F3 | 778 |
| OC3SNGn.207-610a_s_at | POU2F3 | 779 |
| OC3SNGnh.9534_at | PRICKLE2 | 780 |
| OC3P.5913.C1_s_at | PRICKLE2 | 781 |
| OC3SNGnh.9534_x_at | PRICKLE2 | 782 |
| ADXStrong33_at | PRICKLE2 | N/A |
| OC3SNGnh.5282_x_at | PRKG1 | 783 |
| OCMX.3589.C1_at | PRKG1 | 784 |
| OCADNP.7986_s_at | PRKG1 | 785 |
| OC3SNGnh.5282_at | PRKG1 | 786 |
| OC3SNGnh.17864_x_at | PRKG1 | 787 |
| OCADNP.14238_s_at | PRKG1 | 788 |
| OC3SNGnh.17059_s_at | PRKG1 | 789 |
| OCMXSNG.413_x_at | PRKG1 | 790 |
| OCADNP.8589_s_at | PRKG1 | 791 |
| OCEM.2215_at | PRKG1 | 792 |
| OCADNP.11971_s_at | PRKG1 | 793 |
| OCMXSNG.413_at | PRKG1 | 794 |
| OCADA.3268_s_at | PRKG1 | 795 |
| OC3P.943.C2_s_at | PSME1 | 796 |
| OC3P.943.C1_x_at | PSME1 | 797 |
| OC3P.943.C1_s_at | PSME1 | 798 |
| OC3P.11270.C1_s_at | RCAN2 | 799 |
| OC3P.9155.C1_s_at | RDBP | 800 |
| OCMXSNG.5467_x_at | RDBP | 801 |
| OCMXSNG.5045_s_at | RPL23AP1 | 802 |
| OC3SNGnh.19359_x_at | RPL23AP1 | 803 |
| OCHPRC.408_s_at | S100A13 | 804 |
| OC3SNGnh.19423_x_at | S100A13 | 805 |
| OC3SNGnh.4426_at | S100A13 | 806 |
| OCHPRC.408_x_at | S100A13 | 807 |
| OC3SNG.1837-24a_s_at | S100A13 | 808 |
| ADXGoodB16_at | S100A13 | N/A |
| OC3P.1647.C1_s_at | S100A13 | 809 |
| OC3SNGnh.8672_x_at | S100A13 | 810 |
| OC3SNG.5968-144a_x_at | S100A13 | 811 |
| OC3SNGnh.19423_at | S100A13 | 812 |
| OCADNP.3600_s_at | S100A13 | 813 |
| OCADNP.3717_s_at | SAMD9L | 814 |
| OC3P.5848.C1_s_at | SAMD9L | 815 |
| OC3P.9264.C1_s_at | SAMD9L | 816 |
| ADXUgly26_at | SAMD9L | N/A |
| OC3P.10487.C1_s_at | SAMD9L | 817 |
| OC3P.6715.C1_s_at | SECTM1 | 818 |
| OCRS.984_s_at | SECTM1 | 819 |
| OC3SNGnh.7173_x_at | SEMA3C | 820 |
| OC3SNGnh.1972_s_at | SEMA3C | 821 |
| OCADNP.13163_s_at | SEMA3C | 822 |
| OC3P.12081.C1_s_at | SEMA3C | 823 |
| OC3SNGn.4029-2824a_x_at | SERPINB1 | 824 |
| OCHP.1509_s_at | SERPINB1 | 825 |
| OC3P.1480.C1_s_at | SERPINB1 | 826 |
| OCADNP.4790_s_at | SERPINB1 | 827 |
| OC3P.2388.C1_s_at | SERPINB1 | 828 |
| OC3SNGn.4029-2824a_at | SERPINB1 | 829 |
| OC3P.6843.C1-308a_s_at | SLC22A17 | 830 |
| OC3P.6843.C1_at | SLC22A17 | 831 |
| OCADA.8596_s_at | SLC26A10 | 832 |
| OCRS2.621_at | SLC26A10 | 833 |
| OCRS2.621_s_at | SLC26A10 | 834 |
| OCRS2.621_x_at | SLC26A10 | 835 |
| OCADNP.652_s_at | SLC44A4 | 836 |
| OCHP.204_x_at | SLC44A4 | 837 |
| OCADNP.9262_s_at | SLC44A4 | 838 |
| OC3P.11858.C1_x_at | SLC44A4 | 839 |
| OCRS2.12370_x_at | SNORD114-7 | 840 |
| OCRS2.12370_at | SNORD114-7 | 841 |
| OC3P.8666.C1_s_at | SP140L | 842 |
| OCADA.2122_at | SP140L | 843 |
| OCADA.2122_s_at | SP140L | 844 |
| OCADA.2122_x_at | SP140L | 845 |
| OC3SNGnh.1744_at | ST6GAL1 | 846 |
| OC3SNGnh.155_x_at | ST6GAL1 | 847 |
| OCADNP.4027_s_at | ST6GAL1 | 848 |
| OC3P.167.C1_s_at | ST6GAL1 | 849 |
| OC3SNGnh.155_at | ST6GAL1 | 850 |
| OCADA.411_s_at | ST6GAL2 | 851 |
| OCRS.467_at | ST6GAL2 | 852 |
| OCADA.7427_s_at | ST6GAL2 | 853 |
| OCADNP.2470_s_at | SYTL4 | 854 |
| OC3SNGnh.16147_x_at | SYTL4 | 855 |
| OCADA.1925_x_at | SYTL4 | 856 |
| OC3P.12165.C1_s_at | SYTL4 | 857 |
| OC3SNGnh.20531_x_at | TC2N | 858 |
| OC3SNGn.1702-2648a_s_at | TC2N | 859 |
| OC3P.11326.C1_x_at | TC2N | 860 |
| OCADA.4683_s_at | TC2N | 861 |
| ADXUglyB22_at | TC2N | N/A |
| OC3SNGnh.16817_x_at | TC2N | 862 |
| OC3SNGnh.20530_x_at | TC2N | 863 |
| OCHP.1870_s_at | TC2N | 864 |
| OCADNP.230_s_at | TC2N | 865 |
| ADXUglyB50_at | TC2N | N/A |
| OCADA.4438_s_at | TCF4 | 866 |
| OC3P.4112.C1_s_at | TCF4 | 867 |
| OCHP.1876_s_at | TCF4 | 868 |
| OCADA.7185_s_at | TCF4 | 869 |
| OC3SNGnh.10608_s_at | TCF4 | 870 |
| OC3SNGnh.4569_x_at | TCF4 | 871 |
| OCADA.8009_s_at | TCF4 | 872 |
| OCADNP.14530_s_at | TCF4 | 873 |
| OC3SNG.2691-3954a_s_at | TCF4 | 874 |
| OC3SNGnh.10608_x_at | TCF4 | 875 |
| OC3P.3507.C1_s_at | TCF4 | 876 |
| OC3SNG.129-32a_s_at | TCIRG1 | 877 |
| OCRS2.3202_s_at | TCIRG1 | 878 |
| OCEM.457_x_at | TCIRG1 | 879 |
| OCEM.457_at | TCIRG1 | 880 |
| OCADNP.2642_s_at | TMEM169 | 881 |
| OC3P.6478.C1_s_at | TMEM200A | 882 |
| OC3P.6478.C1-363a_s_at | TM EM200A | 883 |
| OC3P.12427.C1_s_at | TMEM62 | 884 |
| OC3SNGn.2801-166a_s_at | TWIST1 | 885 |
| OCRS2.11542_s_at | TWIST1 | 886 |
| OC3SNGnh.13363_s_at | TXK | 887 |
| OC3SNGnh.17188_at | TXK | 888 |
| OC3SNGnh.17188_x_at | TXK | 889 |
| OCEM.1963_at | TXK | 890 |
| OCADNP.7909_s_at | TXK | 891 |
| OC3P.72.C6_x_at | TXK | 892 |
| OC3SNGnh.9832_x_at | TXK | 893 |
| OCADA.11004_s_at | UPK2 | 894 |
| OC3SNGnh.17460_at | USP53 | 895 |
| OCADNP.6200_s_at | USP53 | 896 |
| OC3SNG.3711-13a_s_at | USP53 | 897 |
| OCADA.7608_s_at | USP53 | 898 |
| ADXBad22_at | USP53 | N/A |
| OC3SNGnh.3076_s_at | USP53 | 899 |
| OC3SNGnh.20367_s_at | USP53 | 900 |
| OC3P.11072.C1_s_at | UTP14A | 901 |
| OC3SNGnh.14019_x_at | UTP14A | 902 |
| OC3P.15028.C1_s_at | VCAN | 903 |
| OCADNP.9657_s_at | VCAN | 904 |
| OCMX.15173.C1_s_at | VCAN | 905 |
| OCADNP.6197_s_at | VCAN | 906 |
| OCRS2.1143_s_at | VCAN | 907 |
| OC3SNGnh.16280_x_at | VCAN | 908 |
| OC3P.1200.C1_s_at | VCAN | 909 |
| OCADNP.7898_s_at | WNT11 | 910 |
| OC3P.12878.C1_s_at | WNT11 | 911 |
| OC3P.14348.C1_s_at | ZNF469 | 912 |

[0117] Accordingly, the method may comprise measuring the expression levels of at least one of GABRE, HLA-DPA1, CHI3L1, KCND2, GBP3, UPK2, SYTL4, LRRN1, USP53 and POU2F3. In specific embodiments the method comprises measuring the expression levels of each of GABRE, HLA-DPA1, CHI3L1, KCND2, GBP3, UPK2, SYTL4, LRRN1, USP53 and POU2F3. In further embodiments the method comprises measuring the expression levels of each of the biomarkers from Table F.

[0118] The method may comprise measuring the expression levels of at least 10, 11, 12, 13, 14, 15, 16, 17, 18, 19, 20, 25, 30, 40, 50, 60, 70, 80, 90, 100, 110, 120, 130, 140, 150, 160, 170, 180, 190, 200, 210, 220, 230 or each of the biomarkers from Table I. In certain embodiments the method may comprise measuring the expression levels of 10-25 biomarkers from Table I. The inventors have shown that measuring the expression levels of at least 10 of the markers in Table I enables the subtype to be reliably detected.

TABLE I

| GeneSymbol | GeneWeights | GeneBias |
|---|---|---|
| CRISP3 | 0.009244671 | 4.25279 |
| C10orf81 | 0.007440862 | 4.16685 |
| FBN3 | −0.007135587 | 6.564573 |
| C10orf114 | −0.006683214 | 5.254974 |
| UBD | 0.006650945 | 7.58811 |
| SFRP4 | −0.006511453 | 5.633072 |
| SCGB1D2 | 0.006029484 | 6.09871 |
| CXCL10 | 0.00600034 | 4.105151 |
| DEFB1 | 0.005933262 | 8.354037 |
| CKMT1B | 0.00588501 | 5.604975 |
| PKIA | −0.005796545 | 5.482019 |
| SNORD114-1 | −0.005771097 | 5.340838 |
| HOXA2 | −0.005764275 | 4.239838 |
| UNC5A | 0.005745289 | 5.960387 |
| GBP5 | 0.00567945 | 6.057223 |
| CYP4B1 | 0.005672014 | 5.585854 |
| CTSK | −0.005598646 | 5.849366 |
| BIRC3 | 0.005283614 | 8.531431 |
| LUM | −0.005266949 | 8.364716 |
| NCCRP1 | −0.005084004 | 5.756969 |
| MLLT11 | −0.004961885 | 6.827706 |
| FAM3B | 0.004958968 | 5.101375 |
| RPL9P16 | −0.004910088 | 6.453952 |
| ODZ3 | −0.004851049 | 4.104763 |
| RASL11B | −0.004842413 | 5.802979 |
| MT1G | 0.004809275 | 10.41099 |
| LRP4 | −0.004771008 | 4.664925 |
| PTPN7 | 0.004756756 | 7.284986 |
| COL11A1 | −0.004689519 | 3.541486 |
| TUBB4 | −0.004672931 | 6.359269 |
| SFRP5 | −0.00466637 | 4.142028 |
| CXCL12 | −0.004629236 | 5.117755 |
| TMEM98 | −0.004582999 | 6.070847 |
| TMEM47 | −0.004543117 | 3.355884 |
| SFRP2 | −0.004534184 | 5.576766 |
| KCNJ4 | −0.004467993 | 7.086926 |
| ADAMTS14 | −0.004465207 | 7.399778 |
| EPYC | −0.004441812 | 2.12021 |
| SMAD9 | −0.004437793 | 4.524905 |
| MIR142 | 0.004432341 | 9.492219 |
| MT1L | 0.004420979 | 8.917118 |
| HSPA2 | −0.004393242 | 6.05552 |
| EFS | −0.004375145 | 6.606757 |
| SALL2 | −0.004372373 | 9.157514 |
| CXCL11 | 0.004349799 | 3.526785 |
| ZNF711 | −0.00432014 | 6.528174 |
| IFI44L | 0.004316914 | 5.521583 |
| FAM111B | 0.00430404 | 7.339351 |
| SNORD114-19 | −0.004253407 | 3.757937 |
| ARHGAP28 | −0.004181503 | 4.26543 |
| MSI1 | −0.004167701 | 9.326208 |
| IFI27 | 0.004158526 | 11.45663 |
| NPBWR2 | −0.004145141 | 3.83414 |
| APOL6 | 0.004144974 | 6.173161 |
| THSD4 | 0.004126649 | 5.690818 |
| SLC40A1 | 0.004120522 | 5.142685 |
| CTGF | −0.004106249 | 8.871794 |
| C1orf130 | 0.004067685 | 4.223416 |
| SERPINA1 | 0.004021107 | 8.004173 |
| GPR126 | 0.00400077 | 4.54778 |
| APOL3 | 0.003991698 | 4.01636 |
| SRPX2 | −0.003974194 | 5.049348 |
| COL5A2 | −0.003955444 | 3.591515 |
| MICB | 0.003953138 | 6.388161 |
| CREB3L1 | −0.003911838 | 5.925211 |
| CDKN2C | 0.003889232 | 4.130717 |
| MIR143 | −0.003887926 | 4.429746 |
| CP | 0.003859011 | 5.769209 |
| F2R | −0.003856683 | 4.222794 |
| HLA-DMB | 0.003854578 | 7.489806 |
| FZD4 | 0.003835921 | 6.543752 |
| BTLA | 0.003811543 | 2.668735 |
| ETV7 | 0.00380241 | 4.308987 |
| FAT2 | 0.003791829 | 8.278542 |
| SNCAIP | −0.003787534 | 4.872882 |
| LPAR4 | −0.003781515 | 3.390116 |
| KIAA1324L | −0.003767177 | 4.149923 |
| PTGIS | −0.00372008 | 3.440601 |
| OAS2 | 0.003714546 | 5.35268 |
| AMYP1 | 0.003642358 | 4.651577 |
| PDGFD | −0.003617694 | 4.859654 |
| SERPINE1 | −0.003611522 | 5.967665 |
| THY1 | −0.003600739 | 8.04439 |
| TLR3 | 0.003559666 | 3.031327 |
| GPC6 | −0.00352027 | 3.099243 |
| TMC5 | 0.003486432 | 4.595376 |
| VIM | −0.003473684 | 6.670068 |
| CXCL14 | −0.003442516 | 4.866348 |
| IL15 | 0.003423676 | 3.804955 |
| SORL1 | 0.003413305 | 4.86007 |
| DTX1 | −0.003411875 | 5.52703 |
| PHACTR3 | −0.003369515 | 2.389338 |
| TERC | 0.003345052 | 6.451543 |
| TCF19 | 0.003339104 | 6.786973 |
| TMEM173 | 0.00333562 | 7.37983 |
| GOLGA2B | 0.003305893 | 3.913176 |
| METTL7B | 0.003292198 | 4.251683 |
| KLRK1 | 0.003277955 | 3.255008 |
| LRFN5 | −0.003255765 | 3.659329 |
| OLFML1 | −0.003250239 | 4.37426 |
| PVT1 | 0.00323521 | 6.364487 |
| CEACAM1 | 0.003213045 | 4.457571 |
| SRSF12 | −0.003178071 | 4.193823 |
| ADAMTSL2 | −0.003166265 | 5.4852 |
| SDC1 | −0.003141406 | 7.111513 |
| NXF2B | −0.003111687 | 4.226044 |
| NXF2 | −0.003110081 | 4.225574 |
| APOL1 | 0.003107861 | 7.133371 |
| ALOX5AP | 0.003107153 | 3.680016 |
| SNCG | 0.003097788 | 6.15653 |
| MYC | 0.003079695 | 5.950406 |
| PTRF | −0.003065554 | 7.328583 |
| SNORD114-18 | −0.003064175 | 3.111597 |
| C8orf55 | 0.003049858 | 8.256593 |
| C5orf4 | 0.003023007 | 5.041276 |
| MPDZ | −0.003020738 | 5.691978 |
| SIPA1L2 | −0.003012915 | 5.536502 |
| IFIH1 | 0.003011551 | 3.766603 |
| GALNT1 | −0.003009285 | 6.214229 |
| ROM1 | 0.003003676 | 8.371344 |
| GNG11 | −0.002978147 | 6.079215 |
| COL16A1 | −0.002969937 | 5.391862 |
| RNF113A | 0.002934491 | 7.947432 |
| FZD1 | −0.002929204 | 4.21814 |
| BICC1 | −0.0029214 | 3.748219 |
| NKD1 | −0.002904233 | 4.251593 |
| NRBP2 | 0.00290069 | 8.015463 |
| PARP9 | 0.002890116 | 5.683993 |
| RBMS3 | −0.002877296 | 4.643674 |
| GAS7 | −0.00287466 | 5.679247 |
| TNNI2 | −0.002872443 | 6.833335 |
| HSD17B8 | 0.002860611 | 6.586169 |
| NOTCH3 | −0.002855475 | 8.454157 |
| MEX3B | −0.002855225 | 3.211679 |
| EYA4 | −0.002849764 | 4.787113 |
| PPP1R16A | 0.002828479 | 6.876051 |
| CSRP2 | −0.002826031 | 7.12461 |
| HIF3A | −0.00280492 | 5.061668 |
| CHODL | 0.00279322 | 3.544441 |
| GPR176 | −0.002786706 | 4.252543 |
| VTCN1 | 0.002784647 | 6.131865 |
| PPP1R3B | −0.002779249 | 3.805854 |
| TMEM87B | 0.002771082 | 4.031005 |
| MOBKL2C | 0.002762945 | 7.424328 |
| MBNL3 | 0.002755567 | 3.432856 |
| TGFB3 | −0.002719409 | 5.332476 |
| ATP5J2P3 | 0.002716142 | 4.4555 |
| GPR124 | −0.002697971 | 5.165409 |
| PLXDC1 | −0.002697398 | 5.409047 |
| KIAA1486 | −0.002691441 | 7.697995 |
| KIAA1324 | 0.002688194 | 4.282685 |
| RNPC3 | 0.00267959 | 5.760009 |
| SYPL1 | 0.002648552 | 6.563364 |
| FAM96A | 0.002639649 | 6.181063 |
| TMOD4 | 0.002636074 | 4.746564 |
| SOX4 | −0.002592547 | 9.822965 |
| TIGD5 | 0.002586689 | 6.75499 |
| HLA-B | 0.002577418 | 7.629468 |
| PMP22 | −0.002571323 | 5.568301 |
| PPA1 | 0.00256965 | 9.239775 |
| BMP4 | −0.002542171 | 5.068577 |
| SRPK1 | 0.002541721 | 4.318048 |
| APOBEC3F | 0.00253947 | 5.728234 |
| HSD17614 | −0.00253867 | 7.55482 |
| PLCG1 | −0.00253365 | 7.434086 |
| PTGFRN | −0.002528775 | 5.927735 |
| COPZ2 | −0.002526837 | 5.134159 |
| PRPS2 | 0.002521435 | 6.943428 |
| PHC1 | −0.002519973 | 6.403549 |
| ILDR1 | 0.002519955 | 5.397283 |
| HCCS | 0.002519578 | 6.968027 |
| FJX1 | 0.002512224 | 6.501211 |
| VIPR1 | 0.00248841 | 3.390426 |
| TBC1D26 | −0.002480205 | 4.517079 |
| SDK1 | −0.002464848 | 3.992404 |
| RAB31 | −0.002455378 | 5.320999 |
| MAP3K13 | 0.002451542 | 4.170586 |
| IGFBP7 | −0.002443125 | 5.7624 |
| MX1 | 0.002435356 | 5.723388 |
| HTRA3 | −0.00242504 | 6.086372 |
| PMEPA1 | −0.002423218 | 6.316297 |
| NMNAT2 | 0.002411854 | 4.493685 |
| MYLIP | 0.002396765 | 6.467381 |
| BMF | −0.00239054 | 6.066753 |
| UNC5C | −0.002372973 | 4.261761 |
| B2M | 0.002368988 | 6.658859 |
| UBA7 | 0.002361512 | 8.518656 |
| SPDEF | 0.002357685 | 6.619913 |
| MTCP1 | 0.002341771 | 6.81278 |
| SNORD114-31 | −0.002338204 | 5.484037 |
| HERC6 | 0.002335968 | 5.857723 |
| BRF2 | −0.002323538 | 5.680577 |
| CHSY1 | −0.00228656 | 7.501669 |
| HSPBL3 | 0.002280481 | 8.578614 |
| C20orf3 | −0.002260827 | 8.781748 |
| DNMT3A | −0.002228757 | 7.020806 |
| OLFML3 | −0.002201975 | 6.717051 |
| DCAF5 | −0.002193965 | 6.117841 |
| SSH3 | 0.002182142 | 8.29951 |
| NPR1 | 0.002162441 | 7.269251 |
| DAAM1 | −0.0021509 | 5.886589 |
| HCG27 | 0.002145793 | 5.637696 |
| GRB10 | −0.002122228 | 6.372689 |
| HLA-DRB6 | 0.002075768 | 5.388441 |
| FAAH | 0.002072052 | 6.193823 |
| PUF60 | 0.002069218 | 8.621513 |
| ADAMTS10 | −0.002063412 | 5.207659 |
| ITGB1 | −0.002050701 | 5.441381 |
| ATXN7L3 | −0.002033507 | 8.759396 |
| CC2D1B | 0.002033207 | 5.173507 |
| SNORD46 | 0.001985667 | 10.44473 |
| ZBTB42 | 0.001963734 | 6.248473 |
| C6orf203 | 0.00194317 | 8.555232 |
| DBN1 | −0.001938651 | 9.151773 |
| NDUFS3 | 0.001932125 | 10.30757 |
| PCYOX1 | −0.001928012 | 6.843865 |
| ACTR1A | −0.001923873 | 6.222051 |
| PLEKHG2 | −0.001878479 | 6.339362 |
| PSMA5 | 0.001877248 | 7.908692 |
| MAL | −0.001866829 | 6.959474 |
| SQRDL | 0.001812312 | 6.762735 |
| DDR1 | 0.001781903 | 9.872079 |
| SERPINF1 | −0.00175887 | 10.81461 |
| SEC23A | −0.001701844 | 6.294431 |
| KDM5A | −0.001686649 | 6.389162 |
| RGPD2 | −0.001626152 | 6.125918 |
| LRRC14 | 0.001603355 | 6.772038 |
| RANBP2 | −0.001596694 | 6.338053 |
| MICA | 0.001512553 | 5.489141 |
| FBLN1 | −0.001484613 | 5.872453 |
| OGT | 0.001415954 | 7.57769 |
| EIF4EBP3 | 0.001335629 | 6.514681 |

[0119] The biomarkers from Table I are ranked in Table J from most important to least important based upon hazard ratio reduction when the genes are included versus when they are excluded. The genes/biomarkers may be selected for inclusion in a panel of biomarkers/a signature based on their ranking. Table K illustrates probesets that can be used to detect expression of the biomarkers.

TABLE J

| Gene | Total Delta HR | Rank |
|---|---|---|
| MT1L | 0.615118068 | 1 |
| MT1G | 0.472180746 | 2 |
| LRP4 | 0.428241646 | 3 |
| RASL11B | 0.424158825 | 4 |
| IFI27 | 0.32213756 | 5 |
| PKIA | 0.291930312 | 6 |
| ALOX5AP | 0.272480316 | 7 |
| UBD | 0.242546709 | 8 |
| MEX3B | 0.230392762 | 9 |
| TMEM98 | 0.229231657 | 10 |
| FBN3 | 0.227026061 | 11 |
| CXCL10 | 0.21976009 | 12 |
| ZNF711 | 0.214223021 | 13 |
| MSI1 | 0.192206467 | 14 |
| FAM3B | 0.18592276 | 15 |
| DTX1 | 0.183405107 | 16 |
| CP | 0.183009243 | 17 |
| DEFB1 | 0.173812067 | 18 |
| NRBP2 | 0.168297955 | 19 |
| METTL7B | 0.165287654 | 20 |
| TLR3 | 0.163657588 | 21 |
| CXCL11 | 0.155146275 | 22 |
| NXF2 | 0.152354088 | 23 |
| SNCG | 0.151636955 | 24 |
| IFI44L | 0.15043688 | 25 |
| MOBKL2C | 0.148007901 | 26 |
| NPR1 | 0.144504148 | 27 |
| NXF2B | 0.143829433 | 28 |
| TMEM87B | 0.143514747 | 29 |
| SRSF12 | 0.14192475 | 30 |
| SLC40A1 | 0.14006344 | 31 |
| C10orf114 | 0.138709815 | 32 |
| SOX4 | 0.137379065 | 33 |
| APOL6 | 0.132619361 | 34 |
| APOL3 | 0.131804118 | 35 |
| TMEM173 | 0.127263861 | 36 |
| UNC5A | 0.11842845 | 37 |
| HLA-DMB | 0.118263574 | 38 |
| GPC6 | 0.113746774 | 39 |
| BIRC3 | 0.1130983 | 40 |
| KIAA1486 | 0.110209853 | 41 |
| GPR126 | 0.109454197 | 42 |
| MIR142 | 0.108675197 | 43 |
| HSPBL3 | 0.107843483 | 44 |
| GBP5 | 0.10446511 | 45 |
| VTCN1 | 0.102993036 | 46 |
| EFS | 0.102594908 | 47 |
| IFIH1 | 0.10045923 | 48 |
| APOL1 | 0.100123166 | 49 |
| ILDR1 | 0.100043711 | 50 |
| MX1 | 0.099707498 | 51 |
| PUF60 | 0.098560494 | 52 |
| MICB | 0.097058318 | 53 |
| MICA | 0.095790241 | 54 |
| HERC6 | 0.091124393 | 55 |
| PPP1R16A | 0.090566038 | 56 |
| PHACTR3 | 0.088649365 | 57 |
| BTLA | 0.088347137 | 58 |
| PLCG1 | 0.087624812 | 59 |
| SALL2 | 0.086781935 | 60 |
| C1orf130 | 0.086312394 | 61 |
| VIM | 0.083062394 | 62 |
| IL15 | 0.082662071 | 63 |
| SERPINA1 | 0.080336497 | 64 |
| ROM1 | 0.07576285 | 65 |
| FAT2 | 0.07540916 | 66 |
| KLRK1 | 0.075409095 | 67 |
| PTPN7 | 0.072950165 | 68 |
| PARP9 | 0.071381591 | 69 |
| ATP5J2P3 | 0.068319455 | 70 |
| C8orf55 | 0.067706631 | 71 |
| HLA-DRB6 | 0.065799796 | 72 |
| UBA7 | 0.064343371 | 73 |
| AMYP1 | 0.062359242 | 74 |
| PPP1R3B | 0.061652663 | 75 |
| OAS2 | 0.061174581 | 76 |
| RGPD2 | 0.06018489 | 77 |
| CHSY1 | 0.056973948 | 78 |
| SDK1 | 0.054082406 | 79 |
| MIR143 | 0.053547598 | 80 |
| B2M | 0.053469453 | 81 |
| NPBWR2 | 0.053118153 | 82 |
| SSH3 | 0.05155016 | 83 |
| NDUFS3 | 0.050357674 | 84 |
| SNORD46 | 0.049505727 | 85 |
| LRRC14 | 0.04834913 | 86 |
| SYPL1 | 0.048048239 | 87 |
| GRB10 | 0.042893881 | 88 |
| RANBP2 | 0.042771834 | 89 |
| LRFN5 | 0.04189327 | 90 |
| NKD1 | 0.041594518 | 91 |
| DNMT3A | 0.040633094 | 92 |
| PCYOX1 | 0.040460762 | 93 |
| APOBEC3F | 0.037846365 | 94 |
| BRF2 | 0.03775925 | 95 |
| MYC | 0.037625087 | 96 |
| HCG27 | 0.03651511 | 97 |
| RNPC3 | 0.036449685 | 98 |
| FAM96A | 0.036099171 | 99 |
| ZBTB42 | 0.035762757 | 100 |
| IGFBP7 | 0.035704168 | 101 |
| MAP3K13 | 0.035039881 | 102 |
| GALNT1 | 0.034633608 | 103 |
| MYLIP | 0.034121783 | 104 |
| PHC1 | 0.031292623 | 105 |
| FJX1 | 0.030921305 | 106 |
| CSRP2 | 0.029128198 | 107 |
| HLA-B | 0.028631601 | 108 |
| HSD17B8 | 0.027873252 | 109 |
| PTGFRN | 0.027233148 | 110 |
| DCAF5 | 0.026405405 | 111 |
| TMEM47 | 0.021956786 | 112 |
| SQRDL | 0.021004945 | 113 |
| ETV7 | 0.019282689 | 114 |
| C5orf4 | 0.018300269 | 115 |
| KDM5A | 0.017375372 | 116 |
| NMNAT2 | 0.016695136 | 117 |
| CYP4B1 | 0.014669028 | 118 |
| CC2D1B | 0.014147408 | 119 |
| EIF4EBP3 | 0.013653958 | 120 |
| LPAR4 | 0.013583634 | 121 |
| SNORD114-31 | 0.011357203 | 122 |
| SIPA1L2 | 0.010649087 | 123 |
| ITGB1 | 0.010477821 | 124 |
| ADAMTS10 | 0.010139752 | 125 |
| MLLT11 | 0.010014206 | 126 |
| OGT | 0.009114642 | 127 |
| EYA4 | 0.007618687 | 128 |
| TMC5 | 0.006544943 | 129 |
| ATXN7L3 | 0.005848973 | 130 |
| VIPR1 | 0.005324997 | 131 |
| MTCP1 | 0.00297225 | 132 |
| C20orf3 | 0.002054112 | 133 |
| NOTCH3 | 0.001374142 | 134 |
| PLEKHG2 | 0.000697928 | 135 |
| SNCAIP | −0.000937809 | 136 |
| DAAM1 | −0.001532018 | 137 |
| BMF | −0.002501529 | 138 |
| TIGD5 | −0.004913775 | 139 |
| PSMA5 | −0.004951732 | 140 |
| SNORD114-18 | −0.007256399 | 141 |
| TBC1D26 | −0.00805853 | 142 |
| SEC23A | −0.008366824 | 143 |
| RNF113A | −0.008502226 | 144 |
| FAAH | −0.009699661 | 145 |
| TMOD4 | −0.009707802 | 146 |
| GNG11 | −0.00986732 | 147 |
| RPL9P16 | −0.011949323 | 148 |
| ARHGAP28 | −0.012754103 | 149 |
| UNC5C | −0.013324554 | 150 |
| RBMS3 | −0.014284394 | 151 |
| BMP4 | −0.016512281 | 152 |
| CHODL | −0.019546582 | 153 |
| TERC | −0.020201664 | 154 |
| GPR176 | −0.021146329 | 155 |
| PPA1 | −0.021176568 | 156 |
| DDR1 | −0.021757339 | 157 |
| ACTR1A | −0.023596243 | 158 |
| GPR124 | −0.02574171 | 159 |
| SMAD9 | −0.026817767 | 160 |
| C6orf203 | −0.029106466 | 161 |
| DBN1 | −0.030827615 | 162 |
| SDC1 | −0.032523027 | 163 |
| SPDEF | −0.033787647 | 164 |
| TNNI2 | −0.035527955 | 165 |
| MPDZ | −0.037447958 | 166 |
| PRPS2 | −0.039602179 | 167 |
| PVT1 | −0.04027777 | 168 |
| KIAA1324 | −0.041499097 | 169 |
| SCGB1D2 | −0.043682554 | 170 |
| MBNL3 | −0.045374866 | 171 |
| SORL1 | −0.049145596 | 172 |
| FBLN1 | −0.049870444 | 173 |
| SRPX2 | −0.051419372 | 174 |
| HCCS | −0.053517069 | 175 |
| HTRA3 | −0.05393539 | 176 |
| PMP22 | −0.056596896 | 177 |
| HIF3A | −0.058792401 | 178 |
| ADAMTSL2 | −0.059012281 | 179 |
| CDKN2C | −0.059303226 | 180 |
| F2R | −0.064443812 | 181 |
| GOLGA2B | −0.075799765 | 182 |
| CEACAM1 | −0.080861206 | 183 |
| BICC1 | −0.081748924 | 184 |
| OLFML1 | −0.089688046 | 185 |
| GAS7 | −0.091550492 | 186 |
| TUBB4 | −0.094233082 | 187 |
| SFRP5 | −0.095268495 | 188 |
| PMEPA1 | −0.098648425 | 189 |
| SNORD114-19 | −0.099307115 | 190 |
| SRPK1 | −0.103289867 | 191 |
| MAL | −0.106958728 | 192 |
| HSPA2 | −0.109505993 | 193 |
| NCCRP1 | −0.111600258 | 194 |
| PTGIS | −0.113102299 | 195 |
| KIAA1324L | −0.115645454 | 196 |
| FZD4 | −0.117484004 | 197 |
| TCF19 | −0.125969306 | 198 |
| SERPINF1 | −0.129991571 | 199 |
| PTRF | −0.132998458 | 200 |
| PLXDC1 | −0.133187724 | 201 |
| TGFB3 | −0.149423417 | 202 |
| COPZ2 | −0.150978011 | 203 |
| COL16A1 | −0.152779464 | 204 |
| THSD4 | −0.153534385 | 205 |
| HSD17614 | −0.157660215 | 206 |
| RAB31 | −0.162011114 | 207 |
| OLFML3 | −0.165389996 | 208 |
| KCNJ4 | −0.16970666 | 209 |
| PDGFD | −0.181432458 | 210 |
| FZD1 | −0.183922929 | 211 |
| C10orf81 | −0.189396338 | 212 |
| THY1 | −0.203086307 | 213 |
| SERPINE1 | −0.203441585 | 214 |
| ADAMTS14 | −0.221523101 | 215 |
| CREB3L1 | −0.248768165 | 216 |
| CTGF | −0.250513415 | 217 |
| CRISP3 | −0.257890987 | 218 |
| SNORD114-1 | −0.261554435 | 219 |
| FAM111B | −0.31605279 | 220 |
| CXCL14 | −0.356310031 | 221 |
| COL5A2 | −0.373994826 | 222 |
| SFRP4 | −0.443299754 | 223 |
| ODZ3 | −0.452582522 | 224 |
| CKMT1B | −0.464675681 | 225 |
| HOXA2 | −0.466941259 | 226 |
| CXCL12 | −0.500158659 | 227 |
| SFRP2 | −0.511192219 | 228 |
| EPYC | −0.53044603 | 229 |
| CTSK | −0.548238141 | 230 |
| COL11A1 | −0.548627827 | 231 |
| LUM | −0.666936872 | 232 |

TABLE K

| Probeset | Gene | SEQ ID No. |
|---|---|---|
| OC3SNGnh.12195_x_at | ACTR1A | 913 |
| ADXStrong36_at | ACTR1A | N/A |
| OC3P.4237.C1_s_at | ACTR1A | 914 |
| OC3P.2875.C1_s_at | ACTR1A | 915 |
| OC3SNGn.2781-864a_s_at | ACTR1A | 916 |
| OCADA.3613_s_at | ADAMTS10 | 917 |
| OC3SNGnh.16809_s_at | ADAMTS10 | 918 |
| OCADA.3613_x_at | ADAMTS10 | 919 |
| OC3SNGnh.15138_x_at | ADAMTS10 | 920 |
| OCADNP.16013_s_at | ADAMTS10 | 921 |
| OC3SNGnh.16809_at | ADAMTS10 | 922 |
| OC3P.10843.C1_s_at | ADAMTS14 | 923 |
| OC3P.10512.C1_s_at | ADAMTSL2 | 924 |
| OCRS2.7089_s_at | ADAMTSL2 | 925 |
| OCADNP.9212_s_at | ALOX5AP | 926 |
| OC3SNGn.6061-323a_s_at | ALOX5AP | 927 |
| OCHP.1634_x_at | AMYP1 | 928 |
| OCRS2.10811_s_at | AMYP1 | 929 |
| OCRS2.2503_s_at | AMYP1 | 930 |
| OCUTR.200_s_at | APOBEC3F | 931 |
| OCADNP.5415_x_at | APOBEC3F | 932 |
| OC3SNGn.8424-313a_x_at | APOBEC3F | 933 |
| OC3P.8406.C1_x_at | APOBEC3F | 934 |
| OCADA.5213_s_at | APOBEC3F | 935 |
| OC3P.8406.C1_s_at | APOBEC3F | 936 |
| OC3SNGn.2950-782a_x_at | APOL1 | 937 |
| OC3SNGnh.16528_x_at | APOL1 | 938 |
| OC3SNGnh.16528_at | APOL1 | 939 |
| OC3P.1177.C1_x_at | APOL1 | 940 |
| OC3P.1177.C2_s_at | APOL3 | 941 |
| OC3SNGnh.7607_x_at | APOL3 | 942 |
| OC3P.5638.C1_x_at | APOL6 | 943 |
| OC3SNG.3005-7069a_s_at | APOL6 | 944 |
| OCADA.7386_s_at | ARHGAP28 | 945 |
| OCADNP.8921_s_at | ARHGAP28 | 946 |
| OCRS2.820_s_at | ATP5J2P3 | 947 |
| OCRS2.5034_s_at | ATXN7L3 | 948 |
| OC3SNG.2893-43a_s_at | ATXN7L3 | 949 |
| OCMXSNG.5067_s_at | B2M | 950 |
| OC3P.405.CB2_x_at | B2M | 951 |
| ADXGoodB50_at | B2M | N/A |
| OC3P.405.CB1_x_at | B2M | 952 |
| OCADNP.3105_s_at | B2M | 953 |
| OCADNP.4353_s_at | B2M | 954 |
| OCEM.1629_x_at | B2M | 955 |
| OCADNP.1950_s_at | BICC1 | 956 |
| OCADA.10388_s_at | BICC1 | 957 |
| OCMXSNG.4199_x_at | BICC1 | 958 |
| OC3SNGnh.7031_s_at | BICC1 | 959 |
| OCRS2.4990_s_at | BICC1 | 960 |
| OC3SNGnh.6778_s_at | BICC1 | 961 |
| OC3SNGnh.11887_x_at | BICC1 | 962 |
| OC3SNG.710-16934a_s_at | BIRC3 | 963 |
| OC3SNG.1178-15a_s_at | BIRC3 | 964 |
| OC3P.6452.C1_s_at | BMF | 965 |
| OC3SNGn.2995-3680a_s_at | BMF | 966 |
| OC3SNG.1690-1116a_s_at | BMP4 | 967 |
| OC3SNG.6227-154a_s_at | BMP4 | 968 |
| OCHP.1932_s_at | BMP4 | 969 |
| OCMX.1053.C1_x_at | BRF2 | 970 |
| OCMXSNG.2477_at | BRF2 | 971 |
| ADXStrong39_at | BRF2 | N/A |
| OCMX.1053.C1_at | BRF2 | 972 |
| OCADNP.8779_s_at | BRF2 | 973 |
| OCADNP.8778_s_at | BRF2 | 974 |
| ADXGood98_at | BRF2 | N/A |
| OC3SNGnh.11044_s_at | BTLA | 975 |
| OCRS.1136_s_at | BTLA | 976 |
| OC3SNGn.174-1a_s_at | C10orf114 | 977 |
| OC3SNG.1180-19a_s_at | C10orf81 | 978 |
| OC3SNGn.301-8a_s_at | C10orf81 | 979 |
| OC3P.5692.C1_s_at | C10orf81 | 980 |
| OC3SNGn.7786-6a_s_at | C10orf81 | 981 |
| OC3SNG.1287-14a_s_at | C1orf130 | 982 |
| OC3P.2845.C1_s_at | C20orf3 | 983 |
| OC3P.2845.C1_at | C20orf3 | 984 |
| OC3SNGnh.9851_x_at | C5orf4 | 985 |
| OC3P.5410.C1_s_at | C5orf4 | 986 |
| OC3SNGnh.9851_at | C5orf4 | 987 |
| OC3SNG.887-30a_x_at | C6orf203 | 988 |
| ADXGood87_at | C6orf203 | N/A |
| OC3SNG.4961-30a_x_at | C6orf203 | 989 |
| OC3SNG.2275-28a_x_at | C6orf203 | 990 |
| OC3P.7754.C1_x_at | C8orf55 | 991 |
| OCRS.1072_s_at | CC2D1B | 992 |
| OC3P.8147.C1_s_at | CC2D1B | 993 |
| OCADNP.6491_s_at | CC2D1B | 994 |
| OCADA.5455_s_at | CC2D1B | 995 |
| OCADNP.9668_s_at | CDKN2C | 996 |
| OC3P.12264.C1_x_at | CDKN2C | 997 |
| OC3SNGn.8263-35a_x_at | CEACAM1 | 998 |
| OC3SNGn.2117-1801a_s_at | CEACAM1 | 999 |
| OCHP.710_s_at | CEACAM1 | 1000 |
| OC3P.13249.C1_x_at | CHODL | 1001 |
| OCMX.7042.C1_s_at | CHODL | 1002 |
| OCMX.15594.C1_s_at | CHODL | 1003 |
| OCMXSNG.1530_s_at | CHODL | 1004 |
| OC3SNG.3556-78a_s_at | CHODL | 1005 |
| OCMX.7042.C1_x_at | CHODL | 1006 |
| OC3SNGn.4742-71060a_s_at | CHODL | 1007 |
| OC3SNG.549-201852a_s_at | CHODL | 1008 |
| OC3SNGn.4741-34831a_s_at | CHODL | 1009 |
| OCEM.1035_s_at | CHODL | 1010 |
| OC3P.5287.C1_at | CHSY1 | 1011 |
| OC3P.5894.C1_s_at | CHSY1 | 1012 |
| OC3P.4600.C1_s_at | CKMT1B | 1013 |
| OC3P.1561.C1_s_at | COL11A1 | 1014 |
| OC3P.6907.C1_s_at | COL11A1 | 1015 |
| OC3P.1561.C1_x_at | COL11A1 | 1016 |
| OCADA.4133_s_at | COL11A1 | 1017 |
| OC3SNGnh.16343_x_at | COL11A1 | 1018 |
| OC3P.3047.C1_x_at | COL16A1 | 1019 |
| OC3P.3047.C1-304a_s_at | COL16A1 | 1020 |
| OC3SNGnh.6481_s_at | COL16A1 | 1021 |
| OCMX.338.C1_at | COL5A2 | 1022 |
| OC3P.6029.C1_s_at | COL5A2 | 1023 |
| OCRS2.8960_s_at | COL5A2 | 1024 |
| OCMX.338.C1_x_at | COL5A2 | 1025 |
| OC3P.2713.C1_s_at | COL5A2 | 1026 |
| OC3P.12307.C1_x_at | COL5A2 | 1027 |
| OC3SNGnh.20566_s_at | COPZ2 | 1028 |
| OCADA.4902_s_at | COPZ2 | 1029 |
| OC3SNGnh.4100_at | CP | 1030 |
| OCMX.4331.C3_s_at | CP | 1031 |
| OCADA.4957_s_at | CP | 1032 |
| OCADNP.7608_s_at | CP | 1033 |
| OC3SNG.1600-2703a_s_at | CP | 1034 |
| OC3SNGn.5770-13089a_at | CP | 1035 |
| OCHP.124_s_at | CP | 1036 |
| OC3P.2585.C1_x_at | CP | 1037 |
| OCHPRC.52_s_at | CP | 1038 |
| OCHP.193_s_at | CP | 1039 |
| OC3P.2361.C1_s_at | CP | 1040 |
| OC3SNG.67-21a_s_at | CREB3L1 | 1041 |
| OC3SNG.1826-29a_x_at | CRISP3 | 1042 |
| OC3SNGnh.3590_at | CSRP2 | 1043 |
| OCHP.1027_s_at | CSRP2 | 1044 |
| OCADNP.9526_s_at | CTGF | 1045 |
| OC3P.1178.C1_at | CTGF | 1046 |
| OC3P.1178.C1_x_at | CTGF | 1047 |
| OC3P.4572.C1_s_at | CTSK | 1048 |
| OC3P.3318.C1_s_at | CXCL10 | 1049 |
| OCADA.10769_s_at | CXCL11 | 1050 |
| OCADA.9983_s_at | CXCL11 | 1051 |
| OCHP.873_s_at | CXCL12 | 1052 |
| OCHP.852_s_at | CXCL12 | 1053 |
| OCHP.913_s_at | CXCL12 | 1054 |
| OCADA.8979_s_at | CXCL14 | 1055 |
| OCHP.1072_s_at | CXCL14 | 1056 |
| OC3SNG.240-1128a_s_at | CXCL14 | 1057 |
| OCHP.1896_s_at | CYP4B1 | 1058 |
| OCADNP.709_s_at | CYP4B1 | 1059 |
| OCADNP.2336_s_at | DAAM1 | 1060 |
| OCADNP.4315_s_at | DAAM1 | 1061 |
| OC3P.15553.C1_s_at | DAAM1 | 1062 |
| OC3SNGn.2635-651a_s_at | DAAM1 | 1063 |
| OC3SNGnh.12060_s_at | DAAM1 | 1064 |
| OCADA.7103_s_at | DAAM1 | 1065 |
| OCRS.1398_at | DBN1 | 1066 |
| OC3P.298.C1_s_at | DBN1 | 1067 |
| OCRS.1398_x_at | DBN1 | 1068 |
| OCADA.8592_s_at | DBN1 | 1069 |
| OC3SNG.5293-38a_s_at | DCAF5 | 1070 |
| OCADA.3135_s_at | DCAF5 | 1071 |
| OC3P.12587.C1_s_at | DCAF5 | 1072 |
| OC3P.9318.C1_s_at | DCAF5 | 1073 |
| OC3P.9525.C1_x_at | DDR1 | 1074 |
| OC3SNG.1859-16a_s_at | DDR1 | 1075 |
| OC3SNGn.6552-124a_s_at | DEFB1 | 1076 |
| OCRS2.12509_s_at | DEFB1 | 1077 |
| ADXStrongB6_at | DNMT3A | N/A |
| OC3P.9719.C1_at | DNMT3A | 1078 |
| OCRS2.1573_s_at | DNMT3A | 1079 |
| OC3SNGnh.5575_x_at | DNMT3A | 1080 |
| OCADNP.9700_s_at | DNMT3A | 1081 |
| OC3SNGnh.16027_x_at | DNMT3A | 1082 |
| OCMXSNG.4423_x_at | DNMT3A | 1083 |
| OC3P.9719.C1_s_at | DNMT3A | 1084 |
| OC3P.9719.C1-476a_s_at | DNMT3A | 1085 |
| OCMXSNG.4423_at | DNMT3A | 1086 |
| OC3SNGnh.7008_x_at | DNMT3A | 1087 |
| OC3SNG.804-53a_s_at | DTX1 | 1088 |
| OC3SNGnh.3248_x_at | DTX1 | 1089 |
| OCADA.1205_s_at | DTX1 | 1090 |
| OC3P.2375.C1_s_at | EFS | 1091 |
| OCADNP.10111_s_at | EFS | 1092 |
| OC3P.2318.C1_s_at | EIF4EBP3 | 1093 |
| OC3SNGnh.19542_s_at | EIF4EBP3 | 1094 |
| OCADA.9737_s_at | EPYC | 1095 |
| OC3SNG.3070-45a_s_at | ETV7 | 1096 |
| OCRS2.11702_x_at | ETV7 | 1097 |
| OCEM.668_s_at | ETV7 | 1098 |
| OC3P.6561.C1_s_at | EYA4 | 1099 |
| ADXUglyB80_at | EYA4 | N/A |
| OCRS.391_s_at | EYA4 | 1100 |
| OC3SNGnh.2970_x_at | EYA4 | 1101 |
| OC3SNGnh.15042_x_at | EYA4 | 1102 |
| OCADNP.15820_s_at | F2R | 1103 |
| OCHP.779_x_at | F2R | 1104 |
| OC3SNG.712-38a_s_at | F2R | 1105 |
| OC3P.6713.C1_s_at | FAAH | 1106 |
| OCADA.835_s_at | FAM111B | 1107 |
| OCRS2.11211_x_at | FAM111B | 1108 |
| OCRS2.11211_at | FAM111B | 1109 |
| OCHP.614_s_at | FAM3B | 1110 |
| OC3P.10042.C1_s_at | FAM3B | 1111 |
| OC3SNG.854-20a_s_at | FAM96A | 1112 |
| OC3P.11005.C1_s_at | FAT2 | 1113 |
| OC3P.2096.C1_x_at | FBLN1 | 1114 |
| OC3P.2147.C1-478a_s_at | FBLN1 | 1115 |
| OCHP.904_x_at | FBLN1 | 1116 |
| OCHP.212_s_at | FBLN1 | 1117 |
| OCADNP.9451_s_at | FBLN1 | 1118 |
| OC3P.1250.C1_s_at | FBLN1 | 1119 |
| OCMX.2648.C1_s_at | FBLN1 | 1120 |
| OCHP.899_s_at | FBLN1 | 1121 |
| OC3P.11075.C1_s_at | FBN3 | 1122 |
| OCRS2.5152_s_at | FJX1 | 1123 |
| OC3P.6045.C1_s_at | FJX1 | 1124 |
| OC3P.4921.C1_at | FZD1 | 1125 |
| OC3P.4921.C1-347a_s_at | FZD1 | 1126 |
| OCADNP.7579_s_at | FZD1 | 1127 |
| OC3P.4921.C1_x_at | FZD1 | 1128 |
| OC3SNGn.1967-29a_s_at | FZD4 | 1129 |
| OCADNP.7425_s_at | FZD4 | 1130 |
| OC3P.2042.C1_s_at | FZD4 | 1131 |
| OC3P.13199.C1_s_at | GALNT1 | 1132 |
| OC3SNGnh.8607_x_at | GALNT1 | 1133 |
| OC3P.6817.C1_s_at | GALNT1 | 1134 |
| OCADNP.10124_s_at | GALNT1 | 1135 |
| OCADNP.12320_s_at | GALNT1 | 1136 |
| OCADA.4308_s_at | GALNT1 | 1137 |
| OC3SNG.1687-462a_s_at | GALNT1 | 1138 |
| OC3P.8087.C1_s_at | GAS7 | 1139 |
| OC3SNGn.2341-4940a_s_at | GAS7 | 1140 |
| OC3SNGn.2340-3426a_s_at | GAS7 | 1141 |
| OCADNP.9441_s_at | GAS7 | 1142 |
| OCADA.10080_s_at | GAS7 | 1143 |
| ADXStrongB54_at | GAS7 | N/A |
| OCADA.10109_s_at | GAS7 | 1144 |
| OCADA.1734_s_at | GAS7 | 1145 |
| OC3P.1629.C1_s_at | GBP5 | 1146 |
| OC3SNGn.3058-31a_s_at | GBP5 | 1147 |
| OC3SNGn.8331-31a_s_at | GBP5 | 1148 |
| OC3P.12320.C1_s_at | GNG11 | 1149 |
| OC3P.9220.C1_s_at | GOLGA2B | 1150 |
| OCADNP.11902_s_at | GPC6 | 1151 |
| OC3SNGnh.342_x_at | GPC6 | 1152 |
| OCADA.7642_s_at | GPC6 | 1153 |
| OCADA.4306_s_at | GPC6 | 1154 |
| OCADA.12782_s_at | GPC6 | 1155 |
| OCRS.951_s_at | GPC6 | 1156 |
| OCADNP.14363_s_at | GPC6 | 1157 |
| OCADNP.13892_s_at | GPC6 | 1158 |
| OC3SNGnh.10610_x_at | GPC6 | 1159 |
| OCADA.4214_s_at | GPC6 | 1160 |
| OCRS2.8554_s_at | GPR124 | 1161 |
| OC3P.7680.C1-589a_s_at | GPR124 | 1162 |
| OC3P.7680.C1_at | GPR124 | 1163 |
| OC3SNGn.3383-29a_s_at | GPR126 | 1164 |
| OCADNP.12006_s_at | GPR126 | 1165 |
| OC3P.11725.C1_at | GPR176 | 1166 |
| OCADNP.7882_s_at | GPR176 | 1167 |
| OCADNP.15707_s_at | GPR176 | 1168 |
| OC3P.11725.C1_s_at | GPR176 | 1169 |
| OC3P.13228.C1_s_at | GRB10 | 1170 |
| ADXGoodB21_at | GRB10 | N/A |
| OCADNP.8343_s_at | GRB10 | 1171 |
| OCADA.8023_s_at | GRB10 | 1172 |
| OC3P.9535.C1_s_at | GRB10 | 1173 |
| ADXGood101_at | HCCS | N/A |
| OC3P.3092.C1_s_at | HCCS | 1174 |
| OC3SNG.6061-26a_s_at | HCCS | 1175 |
| OCRS2.11321_s_at | HCG27 | 1176 |
| OC3P.3875.C1_s_at | HERC6 | 1177 |
| OCADA.1952_s_at | HERC6 | 1178 |
| OC3SNGn.7249-10a_x_at | HIF3A | 1179 |
| OCADA.572_s_at | HIF3A | 1180 |
| OCADNP.8797_s_at | HIF3A | 1181 |
| OCADA.452_s_at | HIF3A | 1182 |
| OCADNP.5407_s_at | HIF3A | 1183 |
| OCADNP.5866_s_at | HIF3A | 1184 |
| OCEM.1965_x_at | HLA-B | 1185 |
| OCADNP.9529_x_at | HLA-B | 1186 |
| OCADNP.9519_x_at | HLA-B | 1187 |
| OCADNP.8709_x_at | HLA-B | 1188 |
| OCRS2.731_x_at | HLA-B | 1189 |
| OC3P.141.C12_x_at | HLA-B | 1190 |
| OC3P.141.C17_x_at | HLA-B | 1191 |
| OC3P.4729.C1_s_at | HLA-DMB | 1192 |
| OCMX.15188.C1_s_at | HLA-DMB | 1193 |
| OCRS2.11859_s_at | HLA-DRB6 | 1194 |
| OC3SNGn.5065-56a_x_at | HLA-DRB6 | 1195 |
| OCADNP.4750_x_at | HLA-DRB6 | 1196 |
| OCADNP.6175_x_at | HLA-DRB6 | 1197 |
| OCADA.5023_s_at | HOXA2 | 1198 |
| OC3SNG.4039-40a_s_at | HSD17B14 | 1199 |
| OC3SNG.813-28a_s_at | HSD17B14 | 1200 |
| OC3P.15241.C1_s_at | HSD17B8 | 1201 |
| OC3P.4924.C1_s_at | HSPA2 | 1202 |
| OC3P.4924.C1-306a_s_at | HSPA2 | 1203 |
| OCRS2.3397_s_at | HSPBL3 | 1204 |
| OCHP.611_s_at | HSPBL3 | 1205 |
| OC3P.12955.C1_s_at | HTRA3 | 1206 |
| OC3SNG.638-18a_s_at | HTRA3 | 1207 |
| OC3SNGn.8155-20a_x_at | IFI27 | 1208 |
| OC3P.2271.C3_s_at | IFI27 | 1209 |
| OC3P.12110.C1_s_at | IFI44L | 1210 |
| OC3P.9547.C1_x_at | IFI44L | 1211 |
| OC3P.9547.C1_at | IFI44L | 1212 |
| ADXBad32_at | IFI44L | N/A |
| OC3P.9280.C1_x_at | IFI44L | 1213 |
| OCADA.488_s_at | IFIH1 | 1214 |
| ADXUglyB47_at | IFIH1 | N/A |
| OC3SNGnh.3305_s_at | IFIH1 | 1215 |
| OC3P.10280.C1_s_at | IFIH1 | 1216 |
| OCADA.5602_s_at | IFIH1 | 1217 |
| OCADNP.3740_s_at | IGFBP7 | 1218 |
| OCMX.11971.C1_s_at | IGFBP7 | 1219 |
| OC3SNGn.4133-3670a_x_at | IGFBP7 | 1220 |
| OC3SNGnh.5634_s_at | IGFBP7 | 1221 |
| OC3SNGn.5009-5456a_x_at | IGFBP7 | 1222 |
| ADXGoodB24_at | IGFBP7 | N/A |
| OCADNP.3131_x_at | IGFBP7 | 1223 |
| OC3SNG.1653-16a_s_at | IGFBP7 | 1224 |
| OCADNP.4032_s_at | IGFBP7 | 1225 |
| OCADNP.4758_s_at | IL15 | 1226 |
| OC3SNG.2608-26a_s_at | IL15 | 1227 |
| OC3SNGnh.17571_x_at | IL15 | 1228 |
| OCADNP.7752_s_at | IL15 | 1229 |
| OC3SNGnh.17571_at | IL15 | 1230 |
| OCRS2.6584_s_at | ILDR1 | 1231 |
| OC3SNG.1239-107a_s_at | ILDR1 | 1232 |
| OCADNP.370_s_at | ILDR1 | 1233 |
| OCADNP.4263_s_at | ITGB1 | 1234 |
| OCHP.774_x_at | ITGB1 | 1235 |
| OCHP.334_s_at | ITGB1 | 1236 |
| OCHP.798_x_at | ITGB1 | 1237 |
| OCHP.744_s_at | ITGB1 | 1238 |
| OCADNP.408_s_at | ITGB1 | 1239 |
| OCHP.761_x_at | ITGB1 | 1240 |
| OCADNP.17259_s_at | KCNJ4 | 1241 |
| OCADA.9900_s_at | KCNJ4 | 1242 |
| OCADA.9429_s_at | KDM5A | 1243 |
| OC3SNGnh.17035_at | KDM5A | 1244 |
| OCMX.12398.C1_x_at | KDM5A | 1245 |
| OC3P.6882.C1_s_at | KDM5A | 1246 |
| OC3SNGnh.17668_x_at | KDM5A | 1247 |
| OCHP.1380_s_at | KDM5A | 1248 |
| OC3P.12897.C1_s_at | KDM5A | 1249 |
| OCADNP.2795_s_at | KDM5A | 1250 |
| OC3SNGnh.17035_x_at | KDM5A | 1251 |
| OCADA.4719_s_at | KDM5A | 1252 |
| OC3SNGnh.12409_x_at | KIAA1324 | 1253 |
| ADXBad44_at | KIAA1324 | N/A |
| OC3SNG.4404-2900a_x_at | KIAA1324 | 1254 |
| ADXStrongB45_at | KIAA1324 | N/A |
| OCADNP.5286_s_at | KIAA1324 | 1255 |
| OCMX.11681.C1_at | KIAA1324 | 1256 |
| OCMX.11681.C1_x_at | KIAA1324 | 1257 |
| OC3SNGnh.4924_x_at | KIAA1324 | 1258 |
| OC3SNG.3368-36a_s_at | KIAA1324 | 1259 |
| ADXBad2_at | KIAA1324 | N/A |
| OC3SNG.35-2898a_x_at | KIAA1324 | 1260 |
| OC3P.10299.C1_s_at | KIAA1324 | 1261 |
| OC3SNGn.244-94a_s_at | KIAA1324L | 1262 |
| OCADNP.6595_s_at | KIAA1324L | 1263 |
| OCMX.12418.C1_at | KIAA1486 | 1264 |
| OCADNP.745_s_at | KLRK1 | 1265 |
| OCEM.419_s_at | KLRK1 | 1266 |
| OCADA.9684_s_at | KLRK1 | 1267 |
| ADXUglyB24_at | LPAR4 | N/A |
| OCADA.9771_s_at | LPAR4 | 1268 |
| OCADA.7662_s_at | LRFN5 | 1269 |
| OCADNP.2843_s_at | LRFN5 | 1270 |
| OC3P.7872.C1_s_at | LRP4 | 1271 |
| OCADA.8975_s_at | LRP4 | 1272 |
| ADXUgly12_at | LRRC14 | N/A |
| OC3P.10946.C1_s_at | LRRC14 | 1273 |
| OCHP.1534_x_at | LUM | 1274 |
| OCHP.1534_s_at | LUM | 1275 |
| OCEM.2131_at | MAL | 1276 |
| OCHP.146_s_at | MAL | 1277 |
| OCEM.2131_s_at | MAL | 1278 |
| ADXGoodB51_at | MAL | N/A |
| OCEM.1462_s_at | MAP3K13 | 1279 |
| OC3P.9313.C1_s_at | MAP3K13 | 1280 |
| OCEM.1462_at | MAP3K13 | 1281 |
| OCADNP.11967_s_at | MAP3K13 | 1282 |
| OC3P.12558.C1_s_at | MAP3K13 | 1283 |
| OCADNP.8546_s_at | MAP3K13 | 1284 |
| OC3SNGnh.670_s_at | MAP3K13 | 1285 |
| OCADA.1770_s_at | MAP3K13 | 1286 |
| OCADA.10625_s_at | MAP3K13 | 1287 |
| OCMX.11265.C1_x_at | MBNL3 | 1288 |
| OC3SNGn.7601-3a_s_at | MBNL3 | 1289 |
| OCADNP.12040_s_at | MBNL3 | 1290 |
| OC3P.15006.C1_s_at | MBNL3 | 1291 |
| OCADNP.9948_s_at | MBNL3 | 1292 |
| OCMX.11265.C1_at | MBNL3 | 1293 |
| OCRS.637_s_at | MBNL3 | 1294 |
| OC3P.10771.C1_s_at | METTL7B | 1295 |
| OCADA.11193_s_at | MEX3B | 1296 |
| OC3SNGn.1875-54a_s_at | MEX3B | 1297 |
| OCADNP.936_at | MICA | 1298 |
| OCADNP.936_x_at | MICA | 1299 |
| OC3P.10120.C1_s_at | MICA | 1306 |
| OCRS2.6328_x_at | MICA | 1300 |
| OCEM.1828_at | MICA | 1301 |
| OC3P.10120.C1_x_at | MICA | 1302 |
| OC3SNGnh.18192_x_at | MICA | 1303 |
| OCEM.1828_x_at | MICA | 1304 |
| OC3P.3683.C1_s_at | MICB | 1305 |
| OC3P.10120.C1_s_at | MICB | 1306 |
| OCADA.3772_s_at | MIR142 | 1307 |
| OCADA.3728_s_at | MIR142 | 1308 |
| OC3SNGnh.5895_s_at | MIR143 | 1309 |
| OC3P.12440.C1_s_at | MLLT11 | 1310 |
| OCADNP.5252_s_at | MOBKL2C | 1311 |
| OC3P.8598.C1_x_at | MOBKL2C | 1312 |
| OC3P.11340.C1_s_at | MPDZ | 1313 |
| OCADA.11052_s_at | MPDZ | 1314 |
| OCADNP.9320_s_at | MSI1 | 1315 |
| OCRS.626_at | MSI1 | 1316 |
| OCRS.626_x_at | MSI1 | 1317 |
| OC3SNG.5240-30a_s_at | MT1G | 1318 |
| OC3P.355.C6_x_at | MT1L | 1319 |
| OC3SNG.429-358a_x_at | MT1L | 1320 |
| OC3SNGn.7152-2a_s_at | MT1L | 1321 |
| OCMXSNG.3748_s_at | MTCP1 | 1322 |
| OC3SNG.2207-16a_s_at | MTCP1 | 1323 |
| OCADNP.13496_s_at | MTCP1 | 1324 |
| ADXGood103_at | MTCP1 | N/A |
| OCADA.8530_s_at | MTCP1 | 1325 |
| OC3P.3173.C1_s_at | MX1 | 1326 |
| OC3SNGnh.18345_s_at | MX1 | 1327 |
| OCMXSNG.4976_s_at | MX1 | 1328 |
| OC3SNGn.3343-1542a_s_at | MX1 | 1329 |
| OCMXSNG.5222_s_at | MX1 | 1330 |
| OC3SNGnh.19645_s_at | MX1 | 1331 |
| OC3SNGnh.18497_s_at | MX1 | 1332 |
| ADXStrong8_at | MX1 | N/A |
| OC3SNG.1890-21a_x_at | MYC | 1333 |
| OCRS2.1860_s_at | MYC | 1334 |
| OCADNP.7405_s_at | MYC | 1335 |
| OCADNP.16462_s_at | MYC | 1336 |
| OCHP.226_x_at | MYC | 1337 |
| OC3P.4871.C1_x_at | MYC | 1338 |
| ADXGoodB73_at | MYLIP | N/A |
| OC3P.7441.C2_s_at | MYLIP | 1339 |
| OC3P.2046.C1_x_at | MYLIP | 1340 |
| OC3P.12894.C1_s_at | NCCRP1 | 1341 |
| OC3SNG.4346-38a_s_at | NDUFS3 | 1342 |
| OC3P.5365.C2_s_at | NDUFS3 | 1343 |
| OCADNP.2704_s_at | NKD1 | 1344 |
| OCADA.113_s_at | NKD1 | 1345 |
| OCMX.15105.C1_x_at | NKD1 | 1346 |
| OCMX.15105.C1_at | NKD1 | 1347 |
| OC3P.10474.C1_s_at | NKD1 | 1348 |
| OC3P.10474.C1-853a_s_at | NKD1 | 1349 |
| OCEM.1474_s_at | NMNAT2 | 1350 |
| OC3P.1757.C1_s_at | NMNAT2 | 1351 |
| OCADNP.104_s_at | NMNAT2 | 1352 |
| OCMXSNG.1881_x_at | NMNAT2 | 1353 |
| OC3P.289.C1-454a_s_at | NMNAT2 | 1354 |
| OCMXSNG.1881_at | NMNAT2 | 1355 |
| OC3P.289.C1_at | NMNAT2 | 1356 |
| ADXStrong55_at | NOTCH3 | N/A |
| OCMX.1198.C1_s_at | NOTCH3 | 1357 |
| OCHP.199_s_at | NOTCH3 | 1358 |
| OCADNP.5270_s_at | NOTCH3 | 1359 |
| OC3P.3532.C1_s_at | NOTCH3 | 1360 |
| OCADNP.17585_s_at | NPBWR2 | 1361 |
| OC3SNG.2752-12a_s_at | NPR1 | 1362 |
| OC3P.11825.C1_x_at | NPR1 | 1363 |
| OCRS2.4332_s_at | NRBP2 | 1364 |
| OC3P.5923.C1-395a_s_at | NRBP2 | 1365 |
| OC3SNG.387-9a_s_at | NXF2 | 1366 |
| OC3SNG.387-9a_s_at | NXF2B | 1366 |
| OC3P.1918.C1_at | OAS2 | 1367 |
| OC3P.1918.C1_x_at | OAS2 | 1368 |
| OC3P.9078.C1_s_at | OAS2 | 1369 |
| OC3SNGnh.19480_x_at | OAS2 | 1370 |
| OC3P.14637.C1_s_at | OAS2 | 1371 |
| ADXBad43_at | OAS2 | N/A |
| OC3P.1918.C1-567a_s_at | OAS2 | 1372 |
| OC3SNGnh.13341_x_at | ODZ3 | 1373 |
| OCADA.1894_s_at | ODZ3 | 1374 |
| OCADA.10233_s_at | ODZ3 | 1375 |
| OCADNP.15544_s_at | ODZ3 | 1376 |
| OCRS.2100_at | ODZ3 | 1377 |
| OCRS.2100_x_at | ODZ3 | 1378 |
| OC3P.6938.C1_s_at | OGT | 1379 |
| OC3P.1091.C2_s_at | OGT | 1380 |
| OC3SNGn.4615-28062a_s_at | OGT | 1381 |
| ADXGoodB20_at | OGT | N/A |
| OC3P.1091.C1-398a_s_at | OGT | 1382 |
| ADXGoodB90_at | OGT | N/A |
| OCADA.13060_s_at | OGT | 1383 |
| OC3SNGnh.17759_x_at | OGT | 1384 |
| OC3P.1091.C1_s_at | OGT | 1385 |
| ADXStrong32_at | OGT | N/A |
| ADXGoodB59_at | OGT | N/A |
| OC3P.3843.C1-466a_s_at | OLFML1 | 1386 |
| ADXBad25_at | OLFML1 | N/A |
| OCHPRC.93_s_at | OLFML1 | 1387 |
| OC3P.11342.C1_s_at | OLFML3 | 1388 |
| OC3P.14601.C1_s_at | PARP9 | 1389 |
| OC3SNGnh.18057_at | PARP9 | 1390 |
| OC3SNGnh.17896_x_at | PARP9 | 1391 |
| OC3P.1893.C1_s_at | PARP9 | 1392 |
| OC3SNGn.261-2564a_s_at | PCYOX1 | 1393 |
| OC3P.5613.C1_s_at | PCYOX1 | 1394 |
| OC3SNG.18-15a_x_at | PCYOX1 | 1395 |
| OC3SNGn.8530-2270a_s_at | PCYOX1 | 1396 |
| OCADNP.7249_s_at | PDGFD | 1397 |
| OC3P.9761.C1_s_at | PDGFD | 1398 |
| OC3SNGn.713-1810a_s_at | PDGFD | 1399 |
| OC3SNGnh.16119_at | PDGFD | 1400 |
| OC3SNGnh.10361_x_at | PDGFD | 1401 |
| OC3SNGnh.16119_x_at | PDGFD | 1402 |
| OC3P.5664.C1_s_at | PHACTR3 | 1403 |
| OCADA.2200_x_at | PHACTR3 | 1404 |
| OCADA.2200_s_at | PHACTR3 | 1405 |
| OC3SNGn.2640-38a_s_at | PHC1 | 1406 |
| OCRS2.10640_s_at | PHC1 | 1407 |
| OC3P.8943.C1_s_at | PHC1 | 1408 |
| OCADA.1865_s_at | PKIA | 1409 |
| OCADA.8754_s_at | PKIA | 1410 |
| ADXStrong5_at | PKIA | N/A |
| OCADA.9633_s_at | PKIA | 1411 |
| ADXGoodB7_at | PLCG1 | N/A |
| OC3P.8718.C1_s_at | PLCG1 | 1412 |
| OCADA.5765_s_at | PLCG1 | 1413 |
| OC3P.9725.C1_s_at | PLEKHG2 | 1414 |
| OCADA.4384_s_at | PLEKHG2 | 1415 |
| OC3SNGnh.18488_x_at | PLEKHG2 | 1416 |
| OC3P.9725.C1_at | PLEKHG2 | 1417 |
| OC3SNGnh.18488_at | PLEKHG2 | 1418 |
| OCADA.2995_s_at | PLEKHG2 | 1419 |
| OCMX.11286.C1_s_at | PLXDC1 | 1420 |
| OC3P.13016.C1_s_at | PLXDC1 | 1421 |
| OC3P.11901.C1_s_at | PLXDC1 | 1422 |
| OC3P.3077.C1_s_at | PMEPA1 | 1423 |
| OCHP.1061_s_at | PMEPA1 | 1424 |
| ADXGood72_at | PMP22 | N/A |
| OCADA.9170_s_at | PMP22 | 1425 |
| OC3P.10622.C1_s_at | PMP22 | 1426 |
| OC3SNGnh.8944_s_at | PMP22 | 1427 |
| OCUTR.101_x_at | PPA1 | 1428 |
| OC3P.655.C1_s_at | PPA1 | 1429 |
| OCRS2.12824_x_at | PPP1R16A | 1430 |
| OC3P.59.C1_x_at | PPP1R16A | 1431 |
| OCMXSNG.1294_at | PPP1R16A | 1432 |
| OCMXSNG.1294_x_at | PPP1R16A | 1433 |
| OC3P.1874.C1_s_at | PPP1R3B | 1434 |
| OC3P.12058.C1_s_at | PPP1R3B | 1435 |
| OC3SNGn.3329-2837a_s_at | PPP1R3B | 1436 |
| OC3P.13688.C1_s_at | PRPS2 | 1437 |
| OC3SNGnh.18818_x_at | PRPS2 | 1438 |
| OC3SNG.1788-52a_s_at | PSMA5 | 1439 |
| OC3SNG.6266-52a_x_at | PSMA5 | 1440 |
| OCADA.1277_x_at | PSMA5 | 1441 |
| OCADA.2865_x_at | PSMA5 | 1442 |
| OC3P.5663.C1_s_at | PTGFRN | 1443 |
| OC3P.6990.C1_s_at | PTGFRN | 1444 |
| OCADNP.8703_s_at | PTGIS | 1445 |
| OC3SNGnh.8373_x_at | PTGIS | 1446 |
| OC3SNGnh.8373_at | PTGIS | 1447 |
| OCADNP.9600_s_at | PTGIS | 1448 |
| OC3P.10183.C1_s_at | PTPN7 | 1449 |
| OCADNP.998_x_at | PTRF | 1450 |
| OC3SNG.1416-18a_s_at | PTRF | 1451 |
| OC3P.12255.C1_x_at | PTRF | 1452 |
| OC3SNG.4882-18a_x_at | PTRF | 1453 |
| OC3SNGnh.10165_x_at | PTRF | 1454 |
| OCADNP.8300_s_at | PTRF | 1455 |
| OCHP.964_s_at | PUF60 | 1456 |
| OCHP.1513_s_at | PUF60 | 1457 |
| OCADNP.6711_s_at | PVT1 | 1458 |
| OC3SNGnh.19746_s_at | PVT1 | 1459 |
| OC3P.12914.C1_x_at | PVT1 | 1460 |
| OC3SNGnh.7033_x_at | PVT1 | 1461 |
| OCADA.7024_s_at | PVT1 | 1462 |
| OC3P.12590.C1_s_at | PVT1 | 1463 |
| OC3SNGnh.18875_at | PVT1 | 1464 |
| OC3SNGnh.8972_x_at | PVT1 | 1465 |
| OCADNP.15592_s_at | PVT1 | 1466 |
| OCADA.9299_s_at | PVT1 | 1467 |
| OCADA.2476_s_at | PVT1 | 1468 |
| OC3P.12914.C1_at | PVT1 | 1469 |
| OCADNP.14125_s_at | PVT1 | 1470 |
| OC3SNGnh.18875_x_at | PVT1 | 1471 |
| OC3SNGnh.2328_s_at | PVT1 | 1472 |
| OC3SNGnh.2478_at | PVT1 | 1473 |
| OC3P.8262.C1_s_at | RAB31 | 1474 |
| OC3SNGnh.17870_s_at | RAB31 | 1475 |
| OC3P.11285.C1_s_at | RAB31 | 1476 |
| OCHP.1160_s_at | RAB31 | 1477 |
| OCMX.11222.C1_at | RAB31 | 1478 |
| OCMX.268.C1_s_at | RANBP2 | 1497 |
| OCRS.1769_x_at | RANBP2 | 1479 |
| OC3SNGnh.6542_at | RANBP2 | 1480 |
| OCADA.3091_s_at | RANBP2 | 1481 |
| OCMX.111.C1_s_at | RANBP2 | 1499 |
| OC3P.1162.C1_s_at | RANBP2 | 1482 |
| OCADA.6773_s_at | RANBP2 | 1503 |
| OC3P.11562.C1_s_at | RANBP2 | 1483 |
| OC3P.12656.C1_s_at | RASL11B | 1484 |
| OCRS.1829_at | RBMS3 | 1485 |
| OC3SNGnh.7044_at | RBMS3 | 1486 |
| OCRS.1829_s_at | RBMS3 | 1487 |
| OC3SNGnh.5586_x_at | RBMS3 | 1488 |
| OCADNP.13042_s_at | RBMS3 | 1489 |
| OCADA.2087_s_at | RBMS3 | 1490 |
| OC3SNGnh.7618_at | RBMS3 | 1491 |
| OCMX.1364.C1_x_at | RBMS3 | 1492 |
| OCADA.5823_s_at | RBMS3 | 1493 |
| OC3SNGnh.7224_x_at | RBMS3 | 1494 |
| OC3SNGnh.7224_at | RBMS3 | 1495 |
| OCADA.6168_s_at | RBMS3 | 1496 |
| OCMX.268.C1_s_at | RGPD2 | 1497 |
| OCRS2.11784_s_at | RGPD2 | 1498 |
| OCMX.111.C1_s_at | RGPD2 | 1499 |
| OC3SNGnh.20500_s_at | RGPD2 | 1500 |
| OC3SNGnh.18250_x_at | RGPD2 | 1501 |
| OCRS2.10139_s_at | RGPD2 | 1502 |
| OCADA.6773_s_at | RGPD2 | 1503 |
| OC3P.10240.C1_s_at | RNF113A | 1504 |
| OC3SNG.4959-20a_x_at | RNPC3 | 1505 |
| OC3SNG.885-20a_s_at | RNPC3 | 1506 |
| OCADA.3100_x_at | RNPC3 | 1507 |
| OC3SNG.3327-15a_s_at | ROM1 | 1508 |
| OCRS2.6255_s_at | RPL9P16 | 1509 |
| OC3P.5036.C1_s_at | SALL2 | 1510 |
| OC35NGnh.19445_s_at | SCGB1D2 | 1511 |
| OCHP.701_s_at | SDC1 | 1512 |
| OC3SNGn.2091-716a_s_at | SDC1 | 1513 |
| OC3SNGnh.11631_s_at | SDK1 | 1514 |
| OC3P.15017.C1_x_at | SDK1 | 1515 |
| OC3SNGnh.18247_x_at | SDK1 | 1516 |
| OC3SNGnh.10694_x_at | SDK1 | 1517 |
| OC3SNGnh.2027_at | SDK1 | 1518 |
| OC3SNGnh.11631_at | SDK1 | 1519 |
| OC3SNGnh.13374_x_at | SDK1 | 1520 |
| OC3P.4796.C1_s_at | SDK1 | 1521 |
| OC3SNGnh.12868_at | SDK1 | 1522 |
| OC3SNGnh.15230_s_at | SDK1 | 1523 |
| OCRS2.2187_s_at | SDK1 | 1524 |
| OCRS2.5977_s_at | SDK1 | 1525 |
| OC3SNGnh.14168_x_at | SDK1 | 1526 |
| OC3SNGnh.14168_at | SDK1 | 1527 |
| OC3SNGnh.5808_s_at | SEC23A | 1528 |
| OC3P.2059.C1_s_at | SEC23A | 1529 |
| OCADNP.7566_s_at | SEC23A | 1530 |
| OC3SNGn.2856-15a_s_at | SERPINA1 | 1531 |
| OCADA.3610_s_at | SERPINA1 | 1532 |
| OC3SNGn.5875-4740a_s_at | SERPINE1 | 1533 |
| OC3P.2161.C1_s_at | SERPINE1 | 1534 |
| OCADNP.1839_x_at | SERPINE1 | 1535 |
| OC3SNGn.5874-2592a_s_at | SERPINE1 | 1536 |
| OC3SNGn.5873-1900a_s_at | SERPINE1 | 1537 |
| OCHP.456_s_at | SERPINE1 | 1538 |
| OCMX.148.C44_x_at | SERPINE1 | 1539 |
| OC3SNGn.5872-1154a_x_at | SERPINE1 | 1540 |
| ADXGoodB78_at | SERPINE1 | N/A |
| OC3P.12796.C1_s_at | SERPINE1 | 1541 |
| OC3SNGn.4423-537a_x_at | SERPINE1 | 1542 |
| OCHP.781_s_at | SERPINF1 | 1543 |
| ADXStrong15_at | SERPINF1 | N/A |
| OCEM.1960_at | SERPINF1 | 1544 |
| ADXStrong8_at | SERPINF1 | N/A |
| OC3SNGn.251-21a_s_at | SFRP2 | 1545 |
| OC3P.13621.C1_s_at | SFRP2 | 1546 |
| OC3P.10602.C1_s_at | SFRP4 | 1547 |
| OC3P.10602.C1-303a_s_at | SFRP4 | 1548 |
| OCHP.1367_s_at | SFRP4 | 1549 |
| OCADNP.8054_s_at | SFRP5 | 1550 |
| OC3SNG.617-604a_s_at | SIPA1L2 | 1551 |
| OCADNP.1208_s_at | SIPA1L2 | 1552 |
| ADXGoodB32_at | SIPA1L2 | N/A |
| OCADNP.12385_s_at | SIPA1L2 | 1553 |
| OC3P.2917.C1_s_at | SIPA1L2 | 1554 |
| OC3SNGnh.7545_s_at | SLC40A1 | 1555 |
| OC3SNG.305-10a_s_at | SLC40A1 | 1556 |
| OC3P.10870.C1-466a_s_at | SLC40A1 | 1557 |
| OC3P.10870.C1_s_at | SLC40A1 | 1558 |
| OC3SNGnh.12974_s_at | SLC40A1 | 1559 |
| OCRS.1977_at | SMAD9 | 1560 |
| OCADNP.7805_s_at | SMAD9 | 1561 |
| OCADA.8714_s_at | SMAD9 | 1562 |
| OC3SNGnh.5026_at | SNCAIP | 1563 |
| OC3P.12279.C1_s_at | SNCAIP | 1564 |
| OC3SNGnh.7087_x_at | SNCAIP | 1565 |
| OCHP.747_s_at | SNCG | 1566 |
| OCRS2.1421_x_at | SNORD114-1 | 1567 |
| OCRS2.1421_at | SNORD114-1 | 1568 |
| OCRS2.12766_at | SNORD114-18 | 1571 |
| OCRS2.8346_at | SNORD114-18 | 1569 |
| OCRS2.8346_x_at | SNORD114-18 | 1570 |
| OCRS2.12766_x_at | SNORD114-18 | 1572 |
| OCRS2.12766_at | SNORD114-19 | 1571 |
| OCRS2.12766_x_at | SNORD114-19 | 1572 |
| OCRS2.3148_at | SNORD114-31 | 1573 |
| OCRS2.3148_x_at | SNORD114-31 | 1574 |
| OCRS2.4372_at | SNORD46 | 1575 |
| OCRS2.4372_x_at | SNORD46 | 1576 |
| OC3P.855.C1_x_at | SORL1 | 1577 |
| OC3P.4739.C1-665a_s_at | SORL1 | 1578 |
| OC3SNGnh.3558_x_at | SORL1 | 1579 |
| OC3P.4739.C1_s_at | SORL1 | 1580 |
| OC3P.855.C1-303a_s_at | SORL1 | 1581 |
| OC3SNGnh.3558_at | SORL1 | 1582 |
| OC3P.855.C1_at | SORL1 | 1583 |
| OCRS2.7312_s_at | SORL1 | 1584 |
| OCMX.4125.C1_at | SORL1 | 1585 |
| OCADNP.11708_s_at | SORL1 | 1586 |
| OCADA.2870_s_at | SOX4 | 1587 |
| OCADA.9338_s_at | SOX4 | 1588 |
| OC3SNG.1802-713a_s_at | SOX4 | 1589 |
| OC3P.9406.C1_s_at | SOX4 | 1590 |
| OC3P.10314.C1_s_at | SPDEF | 1591 |
| OC3SNGnh.18260_x_at | SQRDL | 1592 |
| OC3SNGnh.9160_x_at | SQRDL | 1593 |
| OC3P.2220.C1_s_at | SQRDL | 1594 |
| OC3SNGnh.16216_x_at | SRPK1 | 1595 |
| OCHP.676_s_at | SRPK1 | 1596 |
| OC3SNGnh.9486_x_at | SRPK1 | 1597 |
| OC3SNGnh.2729_x_at | SRPX2 | 1598 |
| OC3P.12547.C1_s_at | SRPX2 | 1599 |
| OCADA.5796_s_at | SRPX2 | 1600 |
| OC3SNG.2635-30a_s_at | SRSF12 | 1601 |
| OCADNP.22_s_at | SRSF12 | 1602 |
| OCRS2.6419_s_at | SRSF12 | 1603 |
| OC3P.7155.C1_s_at | SSH3 | 1604 |
| OC3P.13645.C1_s_at | SYPL1 | 1605 |
| OC3P.2792.C1_x_at | SYPL1 | 1606 |
| OCRS2.1456_at | TBC1D26 | 1607 |
| OCRS2.1456_s_at | TBC1D26 | 1608 |
| OC3SNG.5377-16a_s_at | TBC1D26 | 1609 |
| OC3P.7002.C1-421a_s_at | TCF19 | 1610 |
| ADXGood6_at | TCF19 | N/A |
| OCRS2.7197_s_at | TCF19 | 1611 |
| OCHP.901_s_at | TERC | 1612 |
| OC3P.10233.C1_x_at | TGFB3 | 1613 |
| OCADA.11350_at | TGFB3 | 1614 |
| OC3P.10233.C1_s_at | TGFB3 | 1615 |
| OCUTR.173_s_at | THSD4 | 1616 |
| OC3SNGn.8831-5086a_s_at | THSD4 | 1617 |
| OCADA.4455_s_at | THSD4 | 1618 |
| OC3SNGnh.772_at | THSD4 | 1619 |
| OC3SNGnh.15786_x_at | THSD4 | 1620 |
| OC3SNGnh.2176_x_at | THSD4 | 1621 |
| OC3SNGnh.17621_x_at | THSD4 | 1622 |
| OC3SNGnh.12000_x_at | THSD4 | 1623 |
| OC3SNGnh.18146_x_at | THSD4 | 1624 |
| OC3P.15051.C1_x_at | THSD4 | 1625 |
| OC3P.15419.C1_at | THSD4 | 1626 |
| OC3SNGnh.13191_s_at | THSD4 | 1627 |
| OC3SNGnh.18810_x_at | THSD4 | 1628 |
| OC3SNGnh.17600_x_at | THSD4 | 1629 |
| OC3SNGnh.772_x_at | THSD4 | 1630 |
| OC3P.14917.C1_s_at | THSD4 | 1631 |
| OC3SNGnh.2426_x_at | THSD4 | 1632 |
| OC3SNGnh.18810_at | THSD4 | 1633 |
| OC3P.4324.C1_s_at | THSD4 | 1634 |
| OCADA.5329_s_at | THSD4 | 1635 |
| OCUTR.228_x_at | THSD4 | 1636 |
| OCMX.13245.C1_x_at | THSD4 | 1637 |
| OC3P.4993.C1_at | THSD4 | 1638 |
| OC3P.12061.C1_s_at | THSD4 | 1639 |
| OC3SNGnh.17191_s_at | THSD4 | 1640 |
| OCMX.13245.C1_at | THSD4 | 1641 |
| OC3SNGnh.11620_at | THSD4 | 1642 |
| OCMX.14285.C1_x_at | THSD4 | 1643 |
| OC3P.5043.C1_at | THSD4 | 1644 |
| OC3SNGnh.18146_at | THSD4 | 1645 |
| OC3P.4993.C1_s_at | THSD4 | 1646 |
| OC3SNGnh.17441_at | THSD4 | 1647 |
| OC3SNGnh.18103_at | THSD4 | 1648 |
| OC3SNGnh.2426_at | THSD4 | 1649 |
| OC3P.15419.C1_x_at | THSD4 | 1650 |
| OC3SNG.359-662a_s_at | THY1 | 1651 |
| OC3P.2790.C1_s_at | THY1 | 1652 |
| OCHP.607_s_at | THY1 | 1653 |
| OC3P.9682.C1_s_at | TIGD5 | 1654 |
| OCADA.9719_s_at | TLR3 | 1655 |
| OCADA.6345_s_at | TMC5 | 1656 |
| OCADNP.5555_s_at | TMC5 | 1657 |
| OC3P.6033.C1_x_at | TMC5 | 1658 |
| OC3P.1529.C1_s_at | TMC5 | 1659 |
| OC3SNGnh.17082_x_at | TMC5 | 1660 |
| OC3P.3724.C2-437a_s_at | TMEM173 | 1661 |
| OC3P.3724.C2_s_at | TMEM173 | 1662 |
| OC3SNGn.1012-2074a_s_at | TMEM47 | 1663 |
| OC3P.2151.C1_s_at | TMEM47 | 1664 |
| OC3P.13714.C1_s_at | TMEM87B | 1665 |
| OC3SNGnh.4981_at | TMEM87B | 1666 |
| OC3P.2037.C1-520a_s_at | TMEM87B | 1667 |
| OC3SNGnh.4981_x_at | TMEM87B | 1668 |
| OCRS.923_s_at | TMEM87B | 1669 |
| OCADA.6525_s_at | TMEM87B | 1670 |
| OC3P.2037.C1_s_at | TMEM87B | 1671 |
| OC3P.715.C1_x_at | TMEM98 | 1672 |
| OC3P.715.C1_s_at | TMEM98 | 1673 |
| OCMX.14198.C1_x_at | TMEM98 | 1674 |
| OC3P.715.C1_at | TMEM98 | 1675 |
| OCMX.14198.C1_at | TMEM98 | 1676 |
| OC3SNGn.4429-110a_x_at | TMOD4 | 1677 |
| OC3SNGn.395-1a_s_at | TMOD4 | 1678 |
| OC3SNGn.4429-110a_at | TMOD4 | 1679 |
| OC3SNGn.7784-157a_x_at | TMOD4 | 1680 |
| OC3SNGn.1587-1a_s_at | TNNI2 | 1681 |
| OC3SNG.5440-21a_s_at | TNNI2 | 1682 |
| OC3P.10278.C1_x_at | TUBB4 | 1683 |
| OC3P.9430.C1_s_at | UBA7 | 1684 |
| OC3P.1506.C1_s_at | UBD | 1685 |
| OC3P.14896.C1_s_at | UNC5A | 1686 |
| OCADA.3211_s_at | UNC5C | 1687 |
| OCADNP.13201_s_at | UNC5C | 1688 |
| OCADNP.684_s_at | UNC5C | 1689 |
| OC3SNGnh.14349_x_at | UNC5C | 1690 |
| OCMX.12995.C1_at | UNC5C | 1691 |
| OCHP.603_s_at | UNC5C | 1692 |
| OCMX.12995.C1_x_at | UNC5C | 1693 |
| OC3P.1185.C2_x_at | VIM | 1694 |
| OC3SNG.420-22a_x_at | VIM | 1695 |
| OC3SNGn.6624-5a_x_at | VIM | 1696 |
| ADXUglyB15_at | VIPR1 | N/A |
| OC3P.12378.C1_s_at | VIPR1 | 1697 |
| ADXStrongB45_at | VTCN1 | N/A |
| OC3SNGnh.12766_x_at | VTCN1 | 1698 |
| OC3SNGnh.17514_at | VTCN1 | 1699 |
| OCHP.189_s_at | VTCN1 | 1700 |
| OC3SNGnh.18452_x_at | VTCN1 | 1701 |
| OC3SNGnh.17514_x_at | VTCN1 | 1702 |
| OCRS2.2500_s_at | VTCN1 | 1703 |
| OCRS2.7154_s_at | ZBTB42 | 1704 |
| OC3P.10867.C1_s_at | ZBTB42 | 1705 |
| OCADNP.8116_s_at | ZNF711 | 1706 |
| OCRS.1792_s_at | ZNF711 | 1707 |

[0120] Accordingly, the method may comprise measuring the expression levels of at least one of MT1L, MT1G, LRP4, RASL11B, IFI27, PKIA, ALOX5AP, UBD, MEX3B, and TMEM98. In specific embodiments the method comprises measuring the expression levels of each of MT1L, MT1G, LRP4, RASL11B, IFI27, PKIA, ALOX5AP, UBD, MEX3B, and TMEM98. In further embodiments the method comprises measuring the expression levels of each of the biomarkers listed in Table I.

[0121] The method may comprise measuring the expression levels of at least 15, 16, 17, 18, 19, 20, 21, 22, 23, 24, 25, 26, 27, 28, 29, 30, 40, 50, 60, 70, 80, 90, 100, 110, 120, 130, 140, 150, 160, 170, 180, 185 or each of the biomarkers from Table L. In certain embodiments the method may comprise measuring the expression levels of 15-26 biomarkers from Table L. The inventors have shown that measuring the expression levels of at least 15 of the biomarkers in Table L enables the subtype to be reliably detected.

TABLE L

| GeneSymbol | weights | bias |
|---|---|---|
| AARS | −0.65639 | 7.401032 |
| ABCA17P | 0.922294 | 3.334055 |
| ABCA9 | −0.58363 | 4.493582 |
| ADAMTSL2 | −0.38509 | 5.279609 |
| ADRM1 | 1.026765 | 7.596166 |
| AEBP1 | −0.60204 | 7.326171 |
| ANO7 | −0.71308 | 4.327116 |
| APOBEC3F | 1.033609 | 5.893126 |
| APOBEC3G | 0.367923 | 6.401795 |
| ATP5J2P3 | 0.485092 | 4.631863 |
| ATP6V1B1 | 0.453586 | 9.658557 |
| BTLA | 0.584921 | 2.916224 |
| C10orf114 | −0.27237 | 4.821022 |
| C11orf9 | −0.93444 | 5.988653 |
| C1orf130 | 0.618969 | 4.487537 |
| C20orf103 | −0.37885 | 4.647136 |
| C6orf124 | −1.16213 | 5.077056 |
| C7orf27 | −0.67931 | 7.460152 |
| C9orf125 | 0.652801 | 4.915404 |
| CACHD1 | 0.487651 | 5.033627 |
| CALU | −1.02742 | 7.520193 |
| CAMTA1 | −0.89487 | 5.421286 |
| CC2D1B | 0.948738 | 5.305526 |
| CDKN2C | 0.464217 | 4.383252 |
| CHGA | 0.367516 | 4.820369 |
| CHODL | 0.563157 | 3.725809 |
| CLDN6 | −0.22546 | 5.014718 |
| CNOT10 | 0.74618 | 4.275432 |
| COL10A1 | −0.27582 | 6.050837 |
| COL16A1 | −0.72725 | 5.199019 |
| CPD | 0.784465 | 5.488085 |
| CTNNBL1 | −0.8148 | 5.385506 |
| DAAM1 | −0.88057 | 5.746927 |
| DCAF5 | −0.98274 | 5.975384 |
| DDR2 | −1.02071 | 5.653505 |
| DEF8 | 1.11319 | 5.55285 |
| DIS3L | 0.419915 | 5.918805 |
| DLL1 | −0.48834 | 3.669433 |
| DSG2 | −0.72621 | 5.919129 |
| EFNB3 | −0.74559 | 4.919776 |
| EGFLAM | −0.52165 | 4.71277 |
| EID2 | −0.44237 | 5.773564 |
| EIF2AK1 | −0.3068 | 5.658335 |
| EIF4EBP1 | −0.71459 | 7.109601 |
| ENDOU | 0.293396 | 5.348262 |
| ERAP2 | 0.584489 | 5.095089 |
| FAAH2 | 0.173995 | 4.956479 |
| FAM117B | 1.128773 | 4.655475 |
| FAM131B | −0.52377 | 6.175618 |
| FAM134A | 0.849807 | 6.590952 |
| FAM198B | −0.4639 | 2.707193 |
| FAM19A5 | −0.25257 | 3.907392 |
| FAM201A | 0.250566 | 3.910334 |
| FAM86A | 0.634045 | 6.60684 |
| FAT2 | 0.319655 | 8.524751 |
| FAT4 | −0.23655 | 2.889227 |
| FHL2 | 0.537704 | 4.2723 |
| FIGN | −0.34634 | 4.423745 |
| FJX1 | 1.051816 | 6.664334 |
| FRMD8 | 0.532185 | 9.590093 |
| GABRE | 0.239505 | 5.30313 |
| GALNT1 | −0.45313 | 6.018831 |
| GBAP1 | 0.911469 | 4.886108 |
| GBP1 | 0.312193 | 5.58982 |
| GLRX | −0.49583 | 2.318808 |
| GNAI1 | −0.55211 | 6.922587 |
| GNG11 | −0.56131 | 5.885839 |
| GOLGA2B | 0.523479 | 4.127833 |
| GOLGA7 | −0.89626 | 7.894601 |
| GPR124 | −0.61873 | 4.990225 |
| GPR87 | −0.55846 | 2.384806 |
| HCG27 | 0.681432 | 5.777026 |
| HDHD1 | 0.852639 | 5.762428 |
| HECTD3 | 1.031804 | 7.320371 |
| HGSNAT | −0.95292 | 7.324317 |
| HLA-DMB | 0.342698 | 7.74009 |
| HLA-DPA1 | 0.424987 | 6.141466 |
| HOXB3 | 0.769857 | 5.110344 |
| HRASLS | 0.593993 | 5.07244 |
| HSD17B14 | −0.72006 | 7.38998 |
| HSPBP1 | −1.26293 | 7.536136 |
| HTRA1 | −0.53755 | 8.855317 |
| IGFBP7 | −0.63907 | 5.603764 |
| IPO8 | −1.10956 | 7.762268 |
| ITGA11 | −0.54575 | 4.085074 |
| IVNS1ABP | −1.29404 | 7.327752 |
| KCND2 | 0.152994 | 6.978517 |
| KDM5A | −0.77944 | 6.279645 |
| KHDRBS3 | 0.744668 | 3.720225 |
| KIAA1324 | 0.423355 | 4.457234 |
| KIF26A | −0.49085 | 5.151089 |
| LATS2 | −0.84391 | 4.366105 |
| LILRB1 | 0.547184 | 6.286473 |
| LONRF3 | −0.69342 | 3.550519 |
| LRRC47 | 1.147953 | 7.164294 |
| LYRM7 | 1.507855 | 6.993756 |
| MALL | −0.67656 | 6.270219 |
| MAPK1IP1L | −0.76504 | 4.371223 |
| 09-Mar | 0.790383 | 4.372016 |
| MAT2B | 0.508078 | 9.368301 |
| MDH1B | 0.707623 | 4.723468 |
| MED29 | −0.59144 | 7.58716 |
| MIR1245 | −0.21849 | 4.967581 |
| MIR1825 | 0.735714 | 8.113055 |
| MMP13 | −0.2623 | 3.383705 |
| MRVI1 | −0.46315 | 4.85013 |
| MS4A8B | −0.75325 | 2.629675 |
| MT1L | 0.449177 | 9.204179 |
| MTM1 | 0.661607 | 5.61342 |
| MYLIP | 0.478751 | 6.623007 |
| MZT1 | −0.3857 | 6.393013 |
| NCCRP1 | −0.26899 | 5.426857 |
| NDUFAF4 | 0.701993 | 5.308435 |
| NEU1 | −0.77738 | 6.786668 |
| NKD1 | −0.53162 | 4.063017 |
| NMNAT2 | 0.698227 | 4.65029 |
| NOX4 | −0.26589 | 4.562509 |
| NTN4 | 0.338464 | 3.756298 |
| OGFOD2 | 0.919712 | 6.370094 |
| OXNAD1 | −1.1043 | 4.910198 |
| PARP9 | 0.627251 | 5.871653 |
| PCOLCE | −0.74142 | 6.433086 |
| PKHD1L1 | 0.279131 | 3.674874 |
| POLH | 1.022503 | 5.778668 |
| PPA1 | 0.606982 | 9.406626 |
| PPP1R14A | −1.10798 | 5.575699 |
| PPP1R3B | −0.40058 | 3.625393 |
| PPTC7 | −0.92157 | 4.074024 |
| PQLC3 | 0.602949 | 8.622679 |
| PROSC | −1.08894 | 4.917455 |
| PRPS2 | 0.612148 | 7.107149 |
| PRR5L | 0.516817 | 5.137202 |
| PRRT1 | −0.85902 | 4.475276 |
| PTPN7 | 0.23212 | 7.59385 |
| RAB25 | 0.422749 | 8.078456 |
| RANBP3 | 1.272601 | 5.744696 |
| RASAL3 | 0.497973 | 7.040146 |
| RASSF2 | −0.58881 | 3.897682 |
| RIOK3 | −1.16178 | 7.767987 |
| RORA | 0.871987 | 5.720607 |
| SCEL | −0.31467 | 2.339399 |
| SCN3B | 0.498042 | 5.406948 |
| SERPINA5 | −0.37896 | 4.633783 |
| SIPA1L2 | −0.53172 | 5.340869 |
| SLC25A20 | −0.53431 | 3.506854 |
| SLC25A45 | 0.673913 | 7.136345 |
| SLC26A10 | −0.93989 | 5.545123 |
| SLC35A1 | 0.707593 | 7.117949 |
| SLC44A4 | 0.411808 | 6.293524 |
| SNORD119 | 0.586489 | 5.795974 |
| SP100 | 0.667182 | 5.892435 |
| SP140L | 0.640598 | 5.472334 |
| SPG20 | −0.43428 | 4.996652 |
| SRPK1 | 0.622519 | 4.483086 |
| ST6GAL1 | 0.313862 | 4.541053 |
| SYN1 | 1.579045 | 5.950278 |
| SYT13 | 0.47853 | 4.679104 |
| SYTL4 | −0.61486 | 3.764143 |
| TATDN2 | 1.033457 | 7.150942 |
| TBC1D26 | −0.64087 | 4.356035 |
| TBX3 | −0.65687 | 4.556336 |
| TCF4 | −0.47897 | 4.755404 |
| THY1 | −0.35956 | 7.810588 |
| TLR3 | 0.59882 | 3.262462 |
| TMEM169 | −0.36994 | 4.129678 |
| TMEM173 | 0.464915 | 7.596418 |
| TMEM200A | −0.1415 | 3.309473 |
| TMEM200B | −0.43728 | 5.149805 |
| TMEM222 | 0.735448 | 6.376735 |
| TMEM30B | −0.73339 | 4.590222 |
| TMEM55B | −0.87579 | 6.509398 |
| TMEM56 | 0.670554 | 3.237535 |
| TMEM62 | 0.58294 | 5.776118 |
| TMEM87B | 0.918136 | 4.210936 |
| TMOD4 | 0.80627 | 4.917728 |
| TNKS2 | −0.61379 | 5.36376 |
| TNNI2 | −0.41583 | 6.646823 |
| TRRAP | −0.54824 | 5.276388 |
| TSPAN8 | −0.76554 | 5.705074 |
| TWIST1 | −0.18936 | 7.048776 |
| TXK | 0.806144 | 3.558338 |
| UPK2 | −0.33133 | 2.785719 |
| UST | −0.42458 | 6.774158 |
| WBSCR17 | −0.61591 | 4.189211 |
| ZNF426 | 0.643991 | 3.717797 |
| ZNF532 | −0.65961 | 4.723125 |
| ZNF720 | −0.88277 | 5.366577 |
| ZNF818P | 0.484876 | 4.027402 |

[0122] The biomarkers from Table L are ranked in Table M from most important to least important based upon hazard ratio reduction when the genes are included versus when they are excluded. The genes/biomarkers may be selected for inclusion in a panel of biomarkers/a signature based on their ranking. Table N illustrates probesets that can be used to detect expression of the biomarkers.

TABLE M

| GENE | DELTA HR | RANK |
|---|---|---|
| MT1L | 0.908866717 | 1 |
| GABRE | 0.667217276 | 2 |
| KCND2 | 0.591077431 | 3 |
| UPK2 | 0.55842258 | 4 |
| HLA-DPA1 | 0.534607997 | 5 |
| SYTL4 | 0.505566469 | 6 |
| SCEL | 0.30431854 | 7 |
| MZT1 | 0.250806306 | 8 |
| EFNB3 | 0.237987091 | 9 |
| DLL1 | 0.233789098 | 10 |
| TLR3 | 0.205307637 | 11 |
| TMEM173 | 0.194369459 | 12 |
| TMEM87B | 0.193175461 | 13 |
| SCN3B | 0.192271191 | 14 |
| PRRT1 | 0.179933038 | 15 |
| GBP1 | 0.179466776 | 16 |
| TMEM200B | 0.17777205 | 17 |
| SLC25A45 | 0.161031544 | 18 |
| HLA-DMB | 0.160341067 | 19 |
| RASAL3 | 0.157414323 | 20 |
| APOBEC3G | 0.149623496 | 21 |
| MAPK1IP1L | 0.144838522 | 22 |
| TMEM30B | 0.1347231 | 23 |
| SLC25A20 | 0.134309271 | 24 |
| LILRB1 | 0.12938888 | 25 |
| ABCA9 | 0.128671 | 26 |
| C1orf130 | 0.125179667 | 27 |
| MAT2B | 0.118737998 | 28 |
| BTLA | 0.108872863 | 29 |
| FAT2 | 0.10593471 | 30 |
| SP140L | 0.105840398 | 31 |
| POLC3 | 0.105644375 | 32 |
| GNAI1 | 0.105622924 | 33 |
| ERAP2 | 0.102461512 | 34 |
| ABCA17P | 0.098727035 | 35 |
| KHDRBS3 | 0.097222352 | 36 |
| ENDOU | 0.094403985 | 37 |
| EIF4EBP1 | 0.092989305 | 38 |
| PRR5L | 0.092468206 | 39 |
| IVNS1ABP | 0.092283009 | 40 |
| C10orf114 | 0.085519515 | 41 |
| ATP6V1B1 | 0.083089486 | 42 |
| GBAP1 | 0.080820611 | 43 |
| PTPN7 | 0.079381537 | 44 |
| PARP9 | 0.076485924 | 45 |
| CLDN6 | 0.076372844 | 46 |
| LONRF3 | 0.075339299 | 47 |
| ATP5J2P3 | 0.074918776 | 48 |
| ADRM1 | 0.072902153 | 49 |
| MIR1825 | 0.071481869 | 50 |
| FRMD8 | 0.071050122 | 51 |
| SLC26A10 | 0.070430629 | 52 |
| TSPAN8 | 0.069471845 | 53 |
| PROSC | 0.068444648 | 54 |
| SLC44A4 | 0.064557733 | 55 |
| RAB25 | 0.06242119 | 56 |
| RIOK3 | 0.059023943 | 57 |
| PPP1R3B | 0.058984119 | 58 |
| SYT13 | 0.049666341 | 59 |
| SP100 | 0.048903812 | 60 |
| MS4A8B | 0.047361692 | 61 |
| HGSNAT | 0.04711386 | 62 |
| DSG2 | 0.04608177 | 63 |
| SNORD119 | 0.045892653 | 64 |
| C9orf125 | 0.045268656 | 65 |
| EIF2AK1 | 0.043910334 | 66 |
| ZNF720 | 0.039607146 | 67 |
| MTM1 | 0.039550106 | 68 |
| HSPBP1 | 0.038969628 | 69 |
| TBX3 | 0.038421349 | 70 |
| HCG27 | 0.037923398 | 71 |
| DEF8 | 0.037872255 | 72 |
| OGFOD2 | 0.037771874 | 73 |
| ANO7 | 0.036694304 | 74 |
| HECTD3 | 0.03521687 | 75 |
| DCAF5 | 0.03519632 | 76 |
| TRRAP | 0.035103978 | 77 |
| FAM117B | 0.034274233 | 78 |
| RORA | 0.033127429 | 79 |
| MYLIP | 0.031501136 | 80 |
| APOBEC3F | 0.029945075 | 81 |
| IPO8 | 0.029292849 | 82 |
| C7orf27 | 0.027840666 | 83 |
| GALNT1 | 0.027742171 | 84 |
| TMEM55B | 0.026757321 | 85 |
| SYN1 | 0.026561904 | 86 |
| GOLGA7 | 0.026164524 | 87 |
| OXNAD1 | 0.025075483 | 88 |
| FAT4 | 0.024030579 | 89 |
| LYRM7 | 0.022365957 | 90 |
| NKD1 | 0.02217 | 91 |
| IGFBP7 | 0.022093298 | 92 |
| FJX1 | 0.021930692 | 93 |
| FAM134A | 0.020052167 | 94 |
| CAMTA1 | 0.019759097 | 95 |
| FAM198B | 0.018378557 | 96 |
| TNKS2 | 0.017848434 | 97 |
| RANBP3 | 0.017015191 | 98 |
| TMEM222 | 0.016515538 | 99 |
| CTNNBL1 | 0.015872357 | 100 |
| C6orf124 | 0.014534662 | 101 |
| KDM5A | 0.013576727 | 102 |
| ZNF532 | 0.012421816 | 103 |
| AARS | 0.012306547 | 104 |
| MARCH9 | 0.011614808 | 105 |
| CALU | 0.010527118 | 106 |
| NMNAT2 | 0.006468214 | 107 |
| FAM131B | 0.006429583 | 108 |
| TATDN2 | 0.005833596 | 109 |
| CC2D1B | 0.00450517 | 110 |
| PPP1R14A | 0.003255542 | 111 |
| PPTC7 | 0.002737645 | 112 |
| EID2 | 0.002372556 | 113 |
| SERPINA5 | −0.000503962 | 114 |
| CPD | −0.003015939 | 115 |
| GPR87 | −0.005891465 | 116 |
| HOXB3 | −0.006448662 | 117 |
| SIPA1L2 | −0.009142482 | 118 |
| FAM19A5 | −0.016750461 | 119 |
| ZNF426 | −0.017744701 | 120 |
| TMOD4 | −0.021005842 | 121 |
| DAAM1 | −0.028613335 | 122 |
| TBC1D26 | −0.028805165 | 123 |
| POLH | −0.029750395 | 124 |
| C20orf103 | −0.033242781 | 125 |
| WBSCR17 | −0.037692836 | 126 |
| NDUFAF4 | −0.040356361 | 127 |
| CNOT10 | −0.041114163 | 128 |
| MDH1B | −0.043254001 | 129 |
| LRRC47 | −0.043956122 | 130 |
| MED29 | −0.045907542 | 131 |
| ST6GAL1 | −0.046074486 | 132 |
| NEU1 | −0.052972048 | 133 |
| GPR124 | −0.052992737 | 134 |
| PPA1 | −0.0591455 | 135 |
| FHL2 | −0.06017306 | 136 |
| TNNI2 | −0.063216964 | 137 |
| GNG11 | −0.063915596 | 138 |
| TXK | −0.066621406 | 139 |
| FAM86A | −0.066886683 | 140 |
| SLC35A1 | −0.06777196 | 141 |
| UST | −0.074326855 | 142 |
| CHODL | −0.076775005 | 143 |
| PRPS2 | −0.079107843 | 144 |
| C11orf9 | −0.090905443 | 145 |
| SPG20 | −0.094902921 | 146 |
| LATS2 | −0.096137531 | 147 |
| KIAA1324 | −0.097600443 | 148 |
| PKHD1L1 | −0.097977563 | 149 |
| ADAMTSL2 | −0.104445295 | 150 |
| ZNF818P | −0.106667387 | 151 |
| TMEM62 | −0.113695553 | 152 |
| NTN4 | −0.11394366 | 153 |
| CDKN2C | −0.115202927 | 154 |
| FIGN | −0.118426675 | 155 |
| DDR2 | −0.122492204 | 156 |
| MALL | −0.124483421 | 157 |
| TCF4 | −0.13040915 | 158 |
| FAM201A | −0.148492922 | 159 |
| CACHD1 | −0.158203051 | 160 |
| PCOLCE | −0.163832567 | 161 |
| EGFLAM | −0.173262928 | 162 |
| SRPK1 | −0.176833669 | 163 |
| TMEM169 | −0.177073006 | 164 |
| GOLGA2B | −0.179753363 | 165 |
| DIS3L | −0.185618926 | 166 |
| HTRA1 | −0.187842746 | 167 |
| HRASLS | −0.196261694 | 168 |
| NCCRP1 | −0.20711311 | 169 |
| HDHD1 | −0.213988023 | 170 |
| GLRX | −0.222216581 | 171 |
| COL16A1 | −0.229012506 | 172 |
| ITGA11 | −0.235998942 | 173 |
| RASSF2 | −0.238807477 | 174 |
| AEBP1 | −0.24863769 | 175 |
| NOX4 | −0.252796981 | 176 |
| TMEM56 | −0.255940603 | 177 |
| KIF26A | −0.268124669 | 178 |
| HSD17B14 | −0.278110087 | 179 |
| MRVI1 | −0.295208886 | 180 |
| TWIST1 | −0.302130162 | 181 |
| THY1 | −0.3135314 | 182 |
| FAAH2 | −0.344580603 | 183 |
| TMEM200A | −0.385470923 | 184 |
| CHGA | −0.479861362 | 185 |
| COL10A1 | −0.654186132 | 186 |
| MIR1245 | −0.741380447 | 187 |
| MMP13 | −0.896991441 | 188 |

TABLE N

| Probeset | Gene | SEQ ID No. |
|---|---|---|
| OC3P.1619.C1_s_at | AARS | 1708 |
| OC3P.1619.C1_at | AARS | 1709 |
| OC3P.1619.C1_x_at | AARS | 1710 |
| OCADA.3819_s_at | ABCA17P | 1711 |
| OCRS2.4361_s_at | ABCA17P | 1712 |
| OCRS2.11473_s_at | ABCA17P | 1713 |
| OCADNP.4777_s_at | ABCA9 | 1714 |
| OC3P.9255.C1_s_at | ABCA9 | 1715 |
| OC3SNGn.2213-221a_x_at | ABCA9 | 1716 |
| OCADNP.12230_s_at | ABCA9 | 1717 |
| OC3SNGnh.2310_x_at | ABCA9 | 1718 |
| OCADNP.5182_s_at | ABCA9 | 1719 |
| OC3P.10512.C1_s_at | ADAMTSL2 | 1720 |
| OCRS2.7089_s_at | ADAMTSL2 | 1721 |
| OC3P.3283.C2_at | ADRM1 | 1722 |
| OC3SNG.5165-18a_s_at | ADRM1 | 1723 |
| OC3SNGn.2266-7a_s_at | ADRM1 | 1724 |
| OCMXSNG.5475_at | AEBP1 | 1725 |
| OCMXSNG.2603_at | AEBP1 | 1726 |
| ADXStrongB47_at | AEBP1 | N/A |
| OCHP.1649_s_at | AEBP1 | 1727 |
| OC3P.3458.C1_s_at | AEBP1 | 1728 |
| ADXStrongB42_at | AEBP1 | N/A |
| OCMXSNG.5474_at | AEBP1 | 1729 |
| OCMXSNG.5474_x_at | AEBP1 | 1730 |
| OC3P.6301.C1_s_at | ANO7 | 1731 |
| OC3P.6301.C1_at | ANO7 | 1732 |
| OCRS2.2777_s_at | ANO7 | 1733 |
| OCUTR.200_s_at | APOBEC3F | 1734 |
| OCADNP.5415_x_at | APOBEC3F | 1735 |
| OC3SNGn.8424-313a_x_at | APOBEC3F | 1736 |
| OC3P.8406.C1_x_at | APOBEC3F | 1737 |
| OCADA.5213_s_at | APOBEC3F | 1738 |
| OC3P.8406.C1_s_at | APOBEC3F | 1739 |
| OC3SNG.5308-20a_s_at | APOBEC3G | 1740 |
| OCADNP.16260_s_at | APOBEC3G | 1741 |
| OCRS2.820_s_at | ATP5J2P3 | 1742 |
| OC3SNG.5860-81a_s_at | ATP6V1B1 | 1743 |
| OCHP.1217_x_at | ATP6V1B1 | 1744 |
| OC3SNGnh.11044_s_at | BTLA | 1745 |
| OCRS.1136_s_at | BTLA | 1746 |
| OC3SNGn.174-1a_s_at | C10orf114 | 1747 |
| OC3P.860.C1_s_at | C11orf9 | 1748 |
| OCADNP.4793_s_at | C11orf9 | 1749 |
| OC3SNG.1287-14a_s_at | C1orf130 | 1750 |
| OC3P.7546.C1_s_at | C20orf103 | 1751 |
| OCRS2.8279_s_at | C6orf124 | 1752 |
| OCRS2.4080_s_at | C6orf124 | 1753 |
| OC3P.9696.C1_s_at | C7orf27 | 1754 |
| OC3P.5130.C1_at | C9orf125 | 1755 |
| OC3P.15373.C1_s_at | C9orf125 | 1756 |
| OC3P.5130.C1-322a_s_at | C9orf125 | 1757 |
| OCADA.6915_s_at | CACHD1 | 1758 |
| OC3SNGnh.6598_at | CACHD1 | 1759 |
| OC3SNGnh.5252_at | CACHD1 | 1760 |
| OC3SNGnh.5308_x_at | CACHD1 | 1761 |
| OC3P.5821.C1_s_at | CACHD1 | 1762 |
| OC3SNGnh.6598_x_at | CACHD1 | 1763 |
| OC3SNGnh.5252_s_at | CACHD1 | 1764 |
| OC3SNGnh.5955_at | CACHD1 | 1765 |
| OC3SNGnh.4213_x_at | CACHD1 | 1766 |
| ADXGood25_at | CALU | N/A |
| OC3SNGnh.9873_s_at | CALU | 1767 |
| OC3SNG.123-901a_s_at | CALU | 1768 |
| OCADNP.14456_x_at | CALU | 1769 |
| OC3P.2001.C2-449a_s_at | CALU | 1770 |
| OCADNP.7231_s_at | CALU | 1771 |
| OC3SNGnh.11073_x_at | CALU | 1772 |
| OC3P.13898.C1_s_at | CALU | 1773 |
| OCHP.1141_s_at | CALU | 1774 |
| OCADNP.3994_s_at | CALU | 1775 |
| OC3SNG.1183-1605a_s_at | CAMTA1 | 1776 |
| OC3SNGnh.10266_at | CAMTA1 | 1777 |
| OC3SNG.1182-16a_s_at | CAMTA1 | 1778 |
| OC3SNGnh.16971_at | CAMTA1 | 1779 |
| OCADA.12240_s_at | CAMTA1 | 1780 |
| OC3SNGnh.12316_x_at | CAMTA1 | 1781 |
| OC3P.13685.C1_s_at | CAMTA1 | 1782 |
| OC3P.9592.C1_s_at | CAMTA1 | 1783 |
| OC3SNGnh.10266_x_at | CAMTA1 | 1784 |
| OCADA.467_s_at | CAMTA1 | 1785 |
| OCADNP.13448_s_at | CAMTA1 | 1786 |
| OCRS.1072_s_at | CC2D1B | 1787 |
| OC3P.8147.C1_s_at | CC2D1B | 1788 |
| OCADNP.6491_s_at | CC2D1B | 1789 |
| OCADA.5455_s_at | CC2D1B | 1790 |
| OCADNP.9668_s_at | CDKN2C | 1791 |
| OC3P.12264.C1_x_at | CDKN2C | 1792 |
| OC3SNGn.3112-55a_s_at | CHGA | 1793 |
| ADXBad17_at | CHGA | N/A |
| OC3P.13249.C1_x_at | CHODL | 1794 |
| OCMX.7042.C1_s_at | CHODL | 1795 |
| OCMX.15594.C1_s_at | CHODL | 1796 |
| OCMXSNG.1530_s_at | CHODL | 1797 |
| OC3SNG.3556-78a_s_at | CHODL | 1798 |
| OCMX.7042.C1_x_at | CHODL | 1799 |
| OC3SNGn.4742-71060a_s_at | CHODL | 1800 |
| OC3SNG.549-201852a_s_at | CHODL | 1801 |
| OC3SNGn.4741-34831a_s_at | CHODL | 1802 |
| OCEM.1035_s_at | CHODL | 1803 |
| OCHPRC.81_x_at | CLDN6 | 1804 |
| OCRS2.7326_x_at | CLDN6 | 1805 |
| OC3SNG.2953-20a_x_at | CLDN6 | 1806 |
| OCADNP.9501_s_at | CLDN6 | 1807 |
| OC3P.9796.C1_x_at | CNOT10 | 1808 |
| OC3P.9796.C1_at | CNOT10 | 1809 |
| OCADNP.7022_s_at | CNOT10 | 1810 |
| OCRS.383_s_at | COL10A1 | 1811 |
| OC3SNG.1834-947a_s_at | COL10A1 | 1812 |
| OC3P.3047.C1_x_at | COL16A1 | 1813 |
| OC3P.3047.C1-304a_s_at | COL16A1 | 1814 |
| OC3SNGnh.6481_s_at | COL16A1 | 1815 |
| OCADNP.7339_s_at | CPD | 1816 |
| OC3SNGnh.14957_x_at | CPD | 1817 |
| OC3P.6221.C1_x_at | CPD | 1818 |
| OC3P.6221.C1_at | CPD | 1819 |
| OC3P.13725.C1_s_at | CPD | 1820 |
| OC3SNGn.373-984a_s_at | CPD | 1821 |
| OC3SNG.1724-28a_s_at | CPD | 1822 |
| OC3SNGnh.18477_x_at | CTNNBL1 | 1823 |
| OCHP.1190_s_at | CTNNBL1 | 1824 |
| OCADNP.2336_s_at | DAAM1 | 1825 |
| OCADNP.4315_s_at | DAAM1 | 1826 |
| OC3P.15553.C1_s_at | DAAM1 | 1827 |
| OC3SNGn.2635-651a_s_at | DAAM1 | 1828 |
| OC3SNGnh.12060_s_at | DAAM1 | 1829 |
| OCADA.7103_s_at | DAAM1 | 1830 |
| OC3SNG.5293-38a_s_at | DCAF5 | 1831 |
| OCADA.3135_s_at | DCAF5 | 1832 |
| OC3P.12587.C1_s_at | DCAF5 | 1833 |
| OC3P.9318.C1_s_at | DCAF5 | 1834 |
| ADXUgly11_at | DDR2 | N/A |
| OC3SNG.1306-60a_s_at | DDR2 | 1835 |
| OC3P.10616.C1_s_at | DEF8 | 1836 |
| OC3P.14941.C1_s_at | DEF8 | 1837 |
| OC3P.7775.C1_s_at | DIS3L | 1838 |
| OC3SNGn.1174-202a_x_at | DIS3L | 1839 |
| OC3P.8771.C1_s_at | DLL1 | 1840 |
| OCADNP.14063_s_at | DSG2 | 1841 |
| OC3P.2533.C1_s_at | DSG2 | 1842 |
| OC3P.2533.C1_x_at | DSG2 | 1843 |
| OC3P.13694.C1_s_at | DSG2 | 1844 |
| OCADNP.8516_s_at | EFNB3 | 1845 |
| OC3P.9384.C1_s_at | EFNB3 | 1846 |
| OCRS.1751_s_at | EGFLAM | 1847 |
| OC3P.13255.C1_s_at | EGFLAM | 1848 |
| OC3P.9989.C1_s_at | EID2 | 1849 |
| OCMXSNG.5461_s_at | EIF2AK1 | 1850 |
| OC3SNGnh.14331_x_at | EIF2AK1 | 1851 |
| OC3P.301.C1_s_at | EIF2AK1 | 1852 |
| OC3P.2826.C1_s_at | EIF2AK1 | 1853 |
| OC3P.2826.C1-632a_s_at | EIF2AK1 | 1854 |
| OC3P.12951.C1_s_at | EIF4EBP1 | 1855 |
| OCADNP.9346_s_at | ENDOU | 1856 |
| OCADA.3164_x_at | ERAP2 | 1857 |
| OC3P.7237.C1_x_at | ERAP2 | 1858 |
| OC3SNGnh.2998_s_at | ERAP2 | 1859 |
| OCADNP.14937_s_at | ERAP2 | 1860 |
| OCADA.6354_s_at | ERAP2 | 1861 |
| OC3SNGnh.18545_at | FAAH2 | 1862 |
| OC3SNGnh.18545_x_at | FAAH2 | 1863 |
| OCMXSNG.4800_x_at | FAAH2 | 1864 |
| OC3SNGnh.14393_x_at | FAAH2 | 1865 |
| OC3SNGnh.13606_x_at | FAAH2 | 1866 |
| OC3SNGnh.14393_at | FAAH2 | 1867 |
| OC3SNG.6004-30a_s_at | FAAH2 | 1868 |
| OCADNP.15681_s_at | FAM117B | 1869 |
| OC3SNGn.6969-10a_s_at | FAM117B | 1870 |
| OC3SNGn.1670-24a_s_at | FAM117B | 1871 |
| OC3SNGnh.15718_x_at | FAM117B | 1872 |
| OCMX.2476.C1_s_at | FAM117B | 1873 |
| OC3SNG.3088-16a_s_at | FAM131B | 1874 |
| ADXGood101_at | FAM134A | N/A |
| OC3SNG.1366-70a_s_at | FAM134A | 1875 |
| OC3SNGnh.7940_s_at | FAM134A | 1876 |
| OCADA.10797_s_at | FAM134A | 1877 |
| OC3SNGnh.5052_s_at | FAM134A | 1878 |
| OC3SNGn.7559-1580a_at | FAM198B | 1879 |
| OC3P.6417.C1_s_at | FAM198B | 1880 |
| OCRS2.4931_s_at | FAM198B | 1881 |
| OCADA.10843_s_at | FAM198B | 1882 |
| OCADA.5341_s_at | FAM19A5 | 1883 |
| OC3P.13915.C1_s_at | FAM19A5 | 1884 |
| OC3P.14112.C1_s_at | FAM19A5 | 1885 |
| OCADNP.960_s_at | FAM201A | 1886 |
| OCADA.814_s_at | FAM201A | 1887 |
| OC3SNGnh.2090_x_at | FAM86A | 1888 |
| OC3P.2572.C4_s_at | FAM86A | 1889 |
| OCRS2.951_x_at | FAM86A | 1890 |
| OC3P.11005.C1_s_at | FAT2 | 1891 |
| OC3SNG.4266-25a_s_at | FAT4 | 1892 |
| OCHP.668_s_at | FHL2 | 1893 |
| OC3P.12166.C1_at | FHL2 | 1894 |
| OC3P.12762.C1_at | FHL2 | 1895 |
| OC3P.13087.C1 x_at | FHL2 | 1896 |
| OC3SNGnh.7102_at | FHL2 | 1897 |
| OC3P.6364.C1 x_at | FHL2 | 1898 |
| OC3P.13087.C1_at | FHL2 | 1899 |
| OC3SNGnh.9422_at | FHL2 | 1900 |
| OC3SNGnh.5485_s_at | FHL2 | 1901 |
| OC3SNGnh.5485_x_at | FHL2 | 1902 |
| OCADA.6796_s_at | FIGN | 1903 |
| OC3P.15318.C1_at | FIGN | 1904 |
| OCADA.6194_s_at | FIGN | 1905 |
| OCADA.2860_s_at | FIGN | 1906 |
| OCADNP.12019_s_at | FIGN | 1907 |
| OC3P.15266.C1_x_at | FIGN | 1908 |
| OCRS2.5152_s_at | FJX1 | 1909 |
| OC3P.6045.C1_s_at | FJX1 | 1910 |
| OC3P.553.C1_s_at | FRMD8 | 1911 |
| OC3P.6165.C1_s_at | GABRE | 1912 |
| OC3SNGn.6359-34a_s_at | GABRE | 1913 |
| OC3SNGn.6583-10627a_at | GABRE | 1914 |
| OC3SNGn.6583-10627a_x_at | GABRE | 1915 |
| OCMX.833.C13_s_at | GABRE | 1916 |
| OC3P.13199.C1_s_at | GALNT1 | 1917 |
| OC3SNGnh.8607_x_at | GALNT1 | 1918 |
| OC3P.6817.C1_s_at | GALNT1 | 1919 |
| OCADNP.10124_s_at | GALNT1 | 1920 |
| OCADNP.12320_s_at | GALNT1 | 1921 |
| OCADA.4308_s_at | GALNT1 | 1922 |
| OC3SNG.1687-462a_s_at | GALNT1 | 1923 |
| OC3P.3730.C1-349a_s_at | GBAP1 | 1924 |
| OCADNP.16743_s_at | GBAP1 | 1925 |
| OCHP.1292_s_at | GBAP1 | 1926 |
| OCADNP.1974_s_at | GBP1 | 1927 |
| OCADNP.2962_s_at | GBP1 | 1928 |
| OCHP.1438_x_at | GBP1 | 1929 |
| OCRS2.4406_x_at | GBP1 | 1930 |
| OCADA.10565_s_at | GBP1 | 1931 |
| OC3P.1927.C1_x_at | GBP1 | 1932 |
| OCMX.605.C1_at | GLRX | 1933 |
| OCHP.1436_s_at | GLRX | 1934 |
| OCMX.605.C1_x_at | GLRX | 1935 |
| OC3SNGnh.7530_at | GLRX | 1936 |
| OCMX.606.C1_s_at | GLRX | 1937 |
| OC3SNGnh.7530_x_at | GLRX | 1938 |
| OCADNP.8335_s_at | GLRX | 1939 |
| OCMX.606.C1_at | GLRX | 1940 |
| OCRS2.6438_s_at | GNAI1 | 1941 |
| OC3P.1142.C1_s_at | GNAI1 | 1942 |
| ADXGood98_at | GNAI1 | N/A |
| OC3P.12320.C1_s_at | GNG11 | 1943 |
| OC3P.9220.C1_s_at | GOLGA2B | 1944 |
| OCRS2.11208_s_at | GOLGA7 | 1945 |
| OCRS2.8554_s_at | GPR124 | 1946 |
| OC3P.7680.C1-589a_s_at | GPR124 | 1947 |
| OC3P.7680.C1_at | GPR124 | 1948 |
| OCADA.10290_s_at | GPR87 | 1949 |
| OCRS2.11321_s_at | HCG27 | 1950 |
| OCADA.4167_s_at | HDHD1 | 1951 |
| OC3SNGnh.18826_at | HDHD1 | 1952 |
| OC3P.7901.C1_s_at | HDHD1 | 1953 |
| OC3P.10741.C1_s_at | HECTD3 | 1954 |
| OC3P.12375.C1_s_at | HGSNAT | 1955 |
| OC3SNG.1222-16a_x_at | HGSNAT | 1956 |
| OC3SNG.914-13a_s_at | HGSNAT | 1957 |
| OC3SNGnh.10720_s_at | HGSNAT | 1958 |
| OC3P.7601.C1_s_at | HGSNAT | 1959 |
| OC3P.4729.C1_s_at | HLA-DMB | 1960 |
| OCMX.15188.C1_s_at | HLA-DMB | 1961 |
| OC3P.2028.C1_s_at | HLA-DPA1 | 1962 |
| ADXUglyB19_at | HLA-DPA1 | N/A |
| OC3SNGn.2735-12a_s_at | HLA-DPA1 | 1963 |
| OCADNP.5108_s_at | HOXB3 | 1964 |
| OCEM.730_x_at | HOXB3 | 1965 |
| OCADNP.8237_s_at | HOXB3 | 1966 |
| OCEM.730_at | HOXB3 | 1967 |
| OCADA.7670_s_at | HOXB3 | 1968 |
| OC3P.10261.C1_s_at | HOXB3 | 1969 |
| OC3P.2857.C1_s_at | HOXB3 | 1970 |
| OC3SNG.3101-14a_s_at | HRASLS | 1971 |
| OC3SNG.5718-34a_s_at | HRASLS | 1972 |
| OCADA.10152_s_at | HRASLS | 1973 |
| OC3SNG.4039-40a_s_at | HSD17B14 | 1974 |
| OC3SNG.813-28a_s_at | HSD17B14 | 1975 |
| OC3P.9612.C1_s_at | HSPBP1 | 1976 |
| OC3P.9612.C1_x_at | HSPBP1 | 1977 |
| OCHP.902_s_at | HTRA1 | 1978 |
| OCADNP.3740_s_at | IGFBP7 | 1979 |
| OCMX.11971.C1_s_at | IGFBP7 | 1980 |
| OC3SNGn.4133-3670a_x_at | IGFBP7 | 1981 |
| OC3SNGnh.5634_s_at | IGFBP7 | 1982 |
| OC3SNGn.5009-5456a_x_at | IGFBP7 | 1983 |
| ADXGoodB24_at | IGFBP7 | N/A |
| OCADNP.3131_x_at | IGFBP7 | 1984 |
| OC3SNG.1653-16a_s_at | IGFBP7 | 1985 |
| OCADNP.4032_s_at | IGFBP7 | 1986 |
| OC3P.8137.C1_s_at | IPO8 | 1987 |
| OCADNP.7714_s_at | IPO8 | 1988 |
| OC3SNGnh.19520_s_at | ITGA11 | 1989 |
| OCADNP.587_s_at | ITGA11 | 1990 |
| OCMX.7412.C2_at | IVNS1ABP | 1991 |
| OC3P.8210.C1-530a_s_at | IVNS1ABP | 1992 |
| OC3P.9366.C1_at | IVNS1ABP | 1993 |
| OC3P.8210.C1_s_at | IVNS1ABP | 1994 |
| OC3SNGn.2064-1384a_s_at | IVNS1ABP | 1995 |
| OCADNP.13995_s_at | IVNS1ABP | 1996 |
| OCADNP.12825_s_at | IVNS1ABP | 1997 |
| OC3P.1136.C1_s_at | IVNS1ABP | 1998 |
| OC3P.15477.C1_s_at | IVNS1ABP | 1999 |
| OCADNP.7979_s_at | KCND2 | 2000 |
| OCEM.617_s_at | KCND2 | 2001 |
| OCADA.9429_s_at | KDM5A | 2002 |
| OC3SNGnh.17035_at | KDM5A | 2003 |
| OCMX.12398.C1_x_at | KDM5A | 2004 |
| OC3P.6882.C1_s_at | KDM5A | 2005 |
| OC3SNGnh.17668_x_at | KDM5A | 2006 |
| OCHP.1380_s_at | KDM5A | 2007 |
| OC3P.12897.C1_s_at | KDM5A | 2008 |
| OCADNP.2795_s_at | KDM5A | 2009 |
| OC3SNGnh.17035_x_at | KDM5A | 2010 |
| OCADA.4719_s_at | KDM5A | 2011 |
| OC3SNG.5949-16a_s_at | KHDRBS3 | 2012 |
| OC3P.14132.C1_s_at | KHDRBS3 | 2013 |
| OC3SNGnh.13220_s_at | KHDRBS3 | 2014 |
| OCMX.4202.C1_at | KHDRBS3 | 2015 |
| OCMX.4202.C1_x_at | KHDRBS3 | 2016 |
| OC3SNGnh.12409_x_at | KIAA1324 | 2017 |
| ADXBad44_at | KIAA1324 | N/A |
| OC3SNG.4404-2900a_x_at | KIAA1324 | 2018 |
| ADXStrongB45_at | KIAA1324 | N/A |
| OCADNP.5286_s_at | KIAA1324 | 2019 |
| OCMX.11681.C1_at | KIAA1324 | 2020 |
| OCMX.11681.C1_x_at | KIAA1324 | 2021 |
| OC3SNGnh.4924_x_at | KIAA1324 | 2022 |
| OC3SNG.3368-36a_s_at | KIAA1324 | 2023 |
| ADXBad2_at | KIAA1324 | N/A |
| OC3SNG.35-2898a_x_at | KIAA1324 | 2024 |
| OC3P.10299.C1_s_at | KIAA1324 | 2025 |
| OC3P.13885.C1_s_at | KIF26A | 2026 |
| OCADNP.7032_s_at | LATS2 | 2027 |
| OCADA.9355_s_at | LATS2 | 2028 |
| OC3P.13211.C1_s_at | LATS2 | 2029 |
| OCADA.7506_s_at | LATS2 | 2030 |
| OCADA.3519_s_at | LILRB1 | 2031 |
| OCHP.1361_x_at | LILRB1 | 2032 |
| ADXBad33_at | LILRB1 | N/A |
| ADXBad17_at | LILRB1 | N/A |
| OCADA.10299_s_at | LONRF3 | 2033 |
| OC3P.11154.C1_s_at | LONRF3 | 2034 |
| OC3P.7629.C1_s_at | LRRC47 | 2035 |
| OC3SNGn.300-11a_s_at | LYRM7 | 2036 |
| OC3SNG.5278-785a_x_at | LYRM7 | 2037 |
| ADXGood103_at | LYRM7 | N/A |
| OC3SNGnh.8177_x_at | LYRM7 | 2038 |
| OC3SNG.2044-750a_s_at | LYRM7 | 2039 |
| OC3P.13673.C1-400a_s_at | MALL | 2040 |
| OC3P.13673.C1_x_at | MALL | 2041 |
| OC3P.13673.C1_at | MALL | 2042 |
| OCRS.1341_at | MAPK1IP1L | 2043 |
| OC3P.4445.C1_s_at | MAPK1IP1L | 2044 |
| OC3SNGnh.17002_x_at | MAPK1IP1L | 2045 |
| OC3SNGn.2080-4885a_s_at | MAPK1IP1L | 2046 |
| OCADA.2389_at | MAPK1IP1L | 2047 |
| OC3P.4841.C1_s_at | MAPK1IP1L | 2048 |
| OC3SNGnh.17002_at | MAPK1IP1L | 2049 |
| OCRS.1341_x_at | MAPK1IP1L | 2050 |
| OC3SNGnh.1561_s_at | MAPK1IP1L | 2051 |
| OC3P.12193.C1_x_at | MARCH9 | 2052 |
| OCADA.3534_s_at | MARCH9 | 2053 |
| OC3SNGnh.2686_x_at | MARCH9 | 2054 |
| OC3P.12193.C1-488a_s_at | MARCH9 | 2055 |
| OC3P.12193.C1_at | MARCH9 | 2056 |
| OC3P.5073.C1_s_at | MAT2B | 2057 |
| OC3P.5073.C1_x_at | MAT2B | 2058 |
| ADXUgly23 at | MDH1B | N/A |
| OCADA.5923_s_at | MDH1B | 2059 |
| OCADNP.1018_s_at | MDH1B | 2060 |
| OC3SNG.704-39a_x_at | MED29 | 2061 |
| OCEM.259_at | MED29 | 2062 |
| OC3P.3851.C1_x_at | MED29 | 2063 |
| OC3SNGnh.3422_s_at | MIR1245 | 2064 |
| OC3P.3938.C1_x_at | MIR1825 | 2065 |
| OCADA.4427_s_at | MIR1825 | 2066 |
| OCHP.983_s_at | MMP13 | 2067 |
| OCADA.3580_s_at | MRVI1 | 2068 |
| OC3P.1058.C1_s_at | MRVI1 | 2069 |
| OC3P.13126.C1_s_at | MRVI1 | 2070 |
| OCADNP.10237_s_at | MRVI1 | 2071 |
| OC3P.1608.C1_s_at | MS4A8B | 2072 |
| OC3P.355.C6_x_at | MT1L | 2073 |
| OC3SNG.429-358a_x_at | MT1L | 2074 |
| OC3SNGn.7152-2a_s_at | MT1L | 2075 |
| OCEM.2176_at | MTM1 | 2076 |
| OC3P.7705.C1_s_at | MTM1 | 2077 |
| OCADA.7806_x_at | MTM1 | 2078 |
| ADXGoodB73_at | MYLIP | N/A |
| OC3P.7441.C2_s_at | MYLIP | 2079 |
| OC3P.2046.C1_x_at | MYLIP | 2080 |
| OCADA.2961_s_at | MZT1 | 2081 |
| OC3SNGnh.18633_x_at | MZT1 | 2082 |
| OC3P.12894.C1_s_at | NCCRP1 | 2083 |
| OC3SNGnh.4878_at | NDUFAF4 | 2084 |
| OC3SNGnh.4878_x_at | NDUFAF4 | 2085 |
| OC3P.14796.C1_x_at | NDUFAF4 | 2086 |
| OC3SNGnh.18072_x_at | NDUFAF4 | 2087 |
| ADXStrongB6_at | NEU1 | N/A |
| OC3P.831.C1_x_at | NEU1 | 2088 |
| OCHP.1043_s_at | NEU1 | 2089 |
| OCADNP.2704_s_at | NKD1 | 2090 |
| OCADA.113_s_at | NKD1 | 2091 |
| OCMX.15105.C1_x_at | NKD1 | 2092 |
| OCMX.15105.C1_at | NKD1 | 2093 |
| OC3P.10474.C1_s_at | NKD1 | 2094 |
| OC3P.10474.C1-853a_s_at | NKD1 | 2095 |
| OCEM.1474_s_at | NMNAT2 | 2096 |
| OC3P.1757.C1_s_at | NMNAT2 | 2097 |
| OCADNP.104_s_at | NMNAT2 | 2098 |
| OCMXSNG.1881_x_at | NMNAT2 | 2099 |
| OC3P.289.C1-454a_s_at | NMNAT2 | 2100 |
| OCMXSNG.1881_at | NMNAT2 | 2101 |
| OC3P.289.C1_at | NMNAT2 | 2102 |
| OCRS.320_s_at | NOX4 | 2103 |
| OCADNP.14954_s_at | NOX4 | 2104 |
| OC3SNGnh.13560_at | NTN4 | 2105 |
| OC3SNGnh.6387_at | NTN4 | 2106 |
| OCADA.7765_s_at | NTN4 | 2107 |
| OC3SNGnh.16553_x_at | NTN4 | 2108 |
| OC3SNGnh.16553_at | NTN4 | 2109 |
| OC3SNGnh.6387_x_at | NTN4 | 2110 |
| OC3SNGnh.19123_x_at | NTN4 | 2111 |
| OC3P.6445.C1_s_at | NTN4 | 2112 |
| OC3P.8596.C1_s_at | OGFOD2 | 2113 |
| OC3P.14537.C1_s_at | OGFOD2 | 2114 |
| OC3SNG.846-19a_s_at | OXNAD1 | 2115 |
| OC3SNGnh.17867_s_at | OXNAD1 | 2116 |
| OCADNP.2469_s_at | OXNAD1 | 2117 |
| OC3P.14601.C1_s_at | PARP9 | 2118 |
| OC3SNGnh.18057_at | PARP9 | 2119 |
| OC3SNGnh.17896_x_at | PARP9 | 2120 |
| OC3P.1893.C1_s_at | PARP9 | 2121 |
| OCRS2.3088_s_at | PCOLCE | 2122 |
| OC3P.5048.C1_s_at | PCOLCE | 2123 |
| OCMXSNG.2345_s_at | PCOLCE | 2124 |
| OC3P.5246.C1_s_at | PKHD1L1 | 2125 |
| OCRS2.2200_s_at | PKHD1L1 | 2126 |
| OC3SNGnh.1242_x_at | PKHD1L1 | 2127 |
| OCHP.105_s_at | PKHD1L1 | 2128 |
| OCADNP.15163_s_at | PKHD1L1 | 2129 |
| OCADNP.10209_s_at | POLH | 2130 |
| OCADA.4349_s_at | POLH | 2131 |
| OCADNP.8799_x_at | POLH | 2132 |
| OC3SNGn.4978-918a_s_at | POLH | 2133 |
| OCEM.1235_x_at | POLH | 2134 |
| OCUTR.101_x_at | PPA1 | 2135 |
| OC3P.655.C1_s_at | PPA1 | 2136 |
| ADXUgly36_at | PPP1R14A | N/A |
| OCHPRC.13_s_at | PPP1R14A | 2137 |
| OC3P.1874.C1_s_at | PPP1R3B | 2138 |
| OC3P.12058.C1_s_at | PPP1R3B | 2139 |
| OC3SNGn.3329-2837a_s_at | PPP1R3B | 2140 |
| OCADNP.11516_s_at | PPTC7 | 2141 |
| OCADNP.6056_s_at | PPTC7 | 2142 |
| OCRS.827_s_at | PPTC7 | 2143 |
| OC3SNG.5357-16a_s_at | PQLC3 | 2144 |
| OCADA.5737_s_at | PQLC3 | 2145 |
| OCADNP.3913_s_at | PROSC | 2146 |
| OC3SNGnh.3612_x_at | PROSC | 2147 |
| OC3P.10833.C1_x_at | PROSC | 2148 |
| OC3P.4515.C1_s_at | PROSC | 2149 |
| OC3SNGnh.3612_at | PROSC | 2150 |
| OC3P.7265.C1_x_at | PROSC | 2151 |
| ADXGood74_at | PROSC | N/A |
| OC3P.13688.C1_s_at | PRPS2 | 2152 |
| OC3SNGnh.18818_x_at | PRPS2 | 2153 |
| OC3P.15485.C1_s_at | PRR5L | 2154 |
| OC3SNG.1870-16a_at | PRR5L | 2155 |
| OC3SNG.1870-16a_x_at | PRR5L | 2156 |
| OCADNP.14409_s_at | PRR5L | 2157 |
| OCADA.10221_s_at | PRR5L | 2158 |
| OC3SNG.1753-12635a_s_at | PRRT1 | 2159 |
| OC3P.13346.C1_s_at | PRRT1 | 2160 |
| ADXStrongB43_at | PRRT1 | N/A |
| OCADNP.3007_s_at | PRRT1 | 2161 |
| OC3P.10183.C1_s_at | PTPN7 | 2162 |
| OC3SNGn.7993-61a_s_at | RAB25 | 2163 |
| OC3P.9633.C1_s_at | RANBP3 | 2164 |
| OCMXSNG.2939_at | RANBP3 | 2165 |
| OCADA.9981_s_at | RANBP3 | 2166 |
| ADXUglyB26_at | RANBP3 | N/A |
| OCADA.9572_s_at | RANBP3 | 2167 |
| OCADA.13086_s_at | RANBP3 | 2168 |
| OCADA.3307_s_at | RASAL3 | 2169 |
| OC3P.7431.C1_s_at | RASSF2 | 2170 |
| OC3SNGnh.16076_x_at | RIOK3 | 2171 |
| OC3P.11216.C1_s_at | RIOK3 | 2172 |
| OC3SNGnh.11220_x_at | RIOK3 | 2173 |
| OC3SNGnh.7191_x_at | RIOK3 | 2174 |
| OCADNP.4969_s_at | RIOK3 | 2175 |
| OCADNP.11029_s_at | RORA | 2176 |
| OCADNP.14736_s_at | RORA | 2177 |
| OC3SNGnh.15902_at | RORA | 2178 |
| OC3SNGnh.5170_x_at | RORA | 2179 |
| OC3SNGnh.5170_at | RORA | 2180 |
| OCADA.4803_s_at | RORA | 2181 |
| OC3SNGn.5422-69a_s_at | RORA | 2182 |
| OC3SNGnh.7784_s_at | RORA | 2183 |
| OCEM.154_x_at | RORA | 2184 |
| OC3SNGnh.8046_x_at | RORA | 2185 |
| OC3SNGnh.14507_x_at | RORA | 2186 |
| ADXStrong3_at | RORA | N/A |
| OCADNP.10800_s_at | RORA | 2187 |
| OCADNP.12239_s_at | RORA | 2188 |
| ADXStrongB80_at | RORA | N/A |
| OC3SNGnh.15902_x_at | RORA | 2189 |
| OCADA.5291_s_at | RORA | 2190 |
| OC3SNG.1661-145a_s_at | RORA | 2191 |
| ADXStrong13_at | RORA | N/A |
| ADXStrong9_at | RORA | N/A |
| OC3SNGnh.14507_at | RORA | 2192 |
| OC3P.14007.C1_s_at | RORA | 2193 |
| OC3P.14007.C1_x_at | RORA | 2194 |
| OC3SNGnh.5392_at | RORA | 2195 |
| OCADNP.13199_s_at | RORA | 2196 |
| ADXStrong7_at | RORA | N/A |
| OC3SNGnh.13160_s_at | RORA | 2197 |
| OC3P.7464.C1_x_at | RORA | 2198 |
| ADXStrongB91_at | RORA | N/A |
| ADXStrongB78_at | RORA | N/A |
| OC3P.7464.C1_at | RORA | 2199 |
| OC3SNGnh.12483_s_at | RORA | 2200 |
| OC3SNGnh.5392_x_at | RORA | 2201 |
| OC3P.13801.C1_s_at | SCEL | 2202 |
| OC3P.13801.C1-478a_s_at | SCEL | 2203 |
| OCADA.9767_s_at | SCEL | 2204 |
| OCADNP.605_s_at | SCEL | 2205 |
| OC3P.8365.C1_s_at | SCN3B | 2206 |
| OCHP.963_s_at | SERPINA5 | 2207 |
| OC3SNG.617-604a_s_at | SIPA1L2 | 2208 |
| OCADNP.1208_s_at | SIPA1L2 | 2209 |
| ADXGoodB32_at | SIPA1L2 | N/A |
| OCADNP.12385_s_at | SIPA1L2 | 2210 |
| OC3P.2917.C1_s_at | SIPA1L2 | 2211 |
| OC3SNGnh.19852_s_at | SLC25A20 | 2212 |
| OCADNP.7055_at | SLC25A45 | 2213 |
| OCADA.8596_s_at | SLC26A10 | 2214 |
| OCRS2.621_at | SLC26A10 | 2215 |
| OCRS2.621_s_at | SLC26A10 | 2216 |
| OCRS2.621_x_at | SLC26A10 | 2217 |
| OC3P.1533.C1_at | SLC35A1 | 2218 |
| OCADNP.652_s_at | SLC44A4 | 2219 |
| OCHP.204_x_t | SLC44A4 | 2220 |
| OCADNP.9262_s_at | SLC44A4 | 2221 |
| OC3P.11858.C1_x_at | SLC44A4 | 2222 |
| OCRS2.7902_at | SNORD119 | 2223 |
| OC3SNGn.172-18a_s_at | SP100 | 2224 |
| OC3P.14515.C1_s_at | SP100 | 2225 |
| OC3SNGn.6055-155a_s_at | SP100 | 2226 |
| OC3SNGnh.14536_x_at | SP100 | 2227 |
| OCADA.5491_s_at | SP100 | 2228 |
| OC3SNGn.7002-818a_x_at | SP100 | 2229 |
| OCADA.10095_s_at | SP100 | 2230 |
| OC3P.8666.C1_s_at | SP140L | 2231 |
| OCADA.2122_at | SP140L | 2232 |
| OCADA.2122_s_at | SP140L | 2233 |
| OCADA.2122_x_at | SP140L | 2234 |
| OCADNP.5031_s_at | SPG20 | 2235 |
| OC3SNGn.3066-1400a_s_at | SPG20 | 2236 |
| OC3P.5330.C1_s_at | SPG20 | 2237 |
| OCEM.1114_s_at | SPG20 | 2238 |
| OCADA.5138_s_at | SPG20 | 2239 |
| OC3SNGnh.16216_x_at | SRPK1 | 2240 |
| OCHP.676_s_at | SRPK1 | 2241 |
| OC3SNGnh.9486_x_at | SRPK1 | 2242 |
| OC3SNGnh.1744_at | ST6GAL1 | 2243 |
| OC3SNGnh.155_x_at | ST6GAL1 | 2244 |
| OCADNP.4027_s_at | ST6GAL1 | 2245 |
| OC3P.167.C1_s_at | ST6GAL1 | 2246 |
| OC3SNGnh.155_at | ST6GAL1 | 2247 |
| OCADNP.277_s_at | SYN1 | 2248 |
| OC3SNGn.6047-5a_s_at | SYN1 | 2249 |
| OCMX.3057.C3_at | SYN1 | 2250 |
| OC3P.7484.C1_s_at | SYT13 | 2251 |
| OCADNP.2470_s_at | SYTL4 | 2252 |
| OC3SNGnh.16147_x_at | SYTL4 | 2253 |
| OCADA.1925_x_at | SYTL4 | 2254 |
| OC3P.12165.C1_s_at | SYTL4 | 2255 |
| OCADA.2118_s_at | TATDN2 | 2256 |
| ADXStrong16_at | TATDN2 | N/A |
| OC3SNGn.769-1666a_s_at | TATDN2 | 2257 |
| OCHP.1166_s_at | TATDN2 | 2258 |
| OCRS2.1456_at | TBC1D26 | 2259 |
| OCRS2.1456_s_at | TBC1D26 | 2260 |
| OC3SNG.5377-16a_s_at | TBC1D26 | 2261 |
| OCADA.3459_s_at | TBX3 | 2262 |
| OCADNP.14673_s_at | TBX3 | 2263 |
| OC3P.6538.C1_s_at | TBX3 | 2264 |
| OCADNP.8834_s_at | TBX3 | 2265 |
| OCHP.649_s_at | TBX3 | 2266 |
| OCADA.4438_s_at | TCF4 | 2267 |
| OC3P.4112.C1_s_at | TCF4 | 2268 |
| OCHP.1876_s_at | TCF4 | 2269 |
| OCADA.7185_s_at | TCF4 | 2270 |
| OC3SNGnh.10608_s_at | TCF4 | 2271 |
| OC3SNGnh.4569_x_at | TCF4 | 2272 |
| OCADA.8009_s_at | TCF4 | 2273 |
| OCADNP.14530_s_at | TCF4 | 2274 |
| OC3SNG.2691-3954a_s_at | TCF4 | 2275 |
| OC3SNGnh.10608_x_at | TCF4 | 2276 |
| OC3P.3507.C1_s_at | TCF4 | 2277 |
| OC3SNG.359-662a_s_at | THY1 | 2278 |
| OC3P.2790.C1_s_at | THY1 | 2279 |
| OCHP.607_s_at | THY1 | 2280 |
| OCADA.9719_s_at | TLR3 | 2281 |
| OCADNP.2642_s_at | TMEM169 | 2282 |
| OC3P.3724.C2-437a_s_at | TMEM173 | 2283 |
| OC3P.3724.C2_s_at | TMEM173 | 2284 |
| OC3P.6478.C1_s_at | TMEM200A | 2285 |
| OC3P.6478.C1-363a_s_at | TMEM200A | 2286 |
| OCRS2.11454_s_at | TMEM200B | 2287 |
| OCADA.3157_s_at | TMEM200B | 2288 |
| OC3SNGnh.913_s_at | TMEM222 | 2289 |
| ADXGood11_at | TMEM222 | N/A |
| OC3P.2550.C1_s_at | TMEM222 | 2290 |
| OC3P.14967.C1_x_at | TMEM222 | 2291 |
| OC3P.4586.C1_s_at | TMEM30B | 2292 |
| OCADNP.15931_s_at | TMEM30B | 2293 |
| OCRS.1335_s_at | TMEM30B | 2294 |
| OC3P.6263.C1_s_at | TMEM55B | 2295 |
| OC3SNGnh.7925_s_at | TMEM56 | 2296 |
| OCRS2.9192_s_at | TMEM56 | 2297 |
| OCADNP.12494_s_at | TMEM56 | 2298 |
| OC3P.12427.C1_s_at | TMEM62 | 2299 |
| OC3P.13714.C1_s_at | TMEM87B | 2300 |
| OC3SNGnh.4981_at | TMEM87B | 2301 |
| OC3P.2037.C1-520a_s_at | TMEM87B | 2302 |
| OC3SNGnh.4981_x_at | TMEM87B | 2303 |
| OCRS.923_s_at | TMEM87B | 2304 |
| OCADA.6525_s_at | TMEM87B | 2305 |
| OC3P.2037.C1_s_at | TMEM87B | 2306 |
| OC3SNGn.4429-110a_x_at | TMOD4 | 2307 |
| OC3SNGn.395-1a_s_at | TMOD4 | 2308 |
| OC3SNGn.4429-110a_at | TMOD4 | 2309 |
| OC3SNGn.7784-157a_x_at | TMOD4 | 2310 |
| OC3SNGn.682-1836a_s_at | TNKS2 | 2311 |
| OC3P.5143.C1_s_at | TNKS2 | 2312 |
| OCADA.8373_s_at | TNKS2 | 2313 |
| OC3SNGn.1587-1a_s_at | TNNI2 | 2314 |
| OC3SNG.5440-21a_s_at | TNNI2 | 2315 |
| OC3SNGnh.12737_x_at | TRRAP | 2316 |
| OC3SNGnh.334_s_at | TRRAP | 2317 |
| OC3SNGnh.12737_at | TRRAP | 2318 |
| OCADNP.4013_s_at | TRRAP | 2319 |
| OC3SNGnh.334_at | TRRAP | 2320 |
| OCHP.1454_s_at | TRRAP | 2321 |
| OC3SNG.6204-21a_s_at | TSPAN8 | 2322 |
| OCHPRC.1350_at | TSPAN8 | 2323 |
| OC3SNGn.2801-166a_s_at | TWIST1 | 2324 |
| OCRS2.11542_s_at | TWIST1 | 2325 |
| OC3SNGnh.13363_s_at | TXK | 2326 |
| OC3SNGnh.17188_at | TXK | 2327 |
| OC3SNGnh.17188_x_at | TXK | 2328 |
| OCEM.1963_at | TXK | 2329 |
| OCADNP.7909_s_at | TXK | 2330 |
| OC3P.72.C6_x_at | TXK | 2331 |
| OC3SNGnh.9832_x_at | TXK | 2332 |
| OCADA.11004_s_at | UPK2 | 2333 |
| OC3SNGnh.91_s_at | UST | 2334 |
| OC3SNGn.350-2795a_s_at | UST | 2335 |
| ADXStrongB3_at | UST | N/A |
| OC3SNGnh.6725_x_at | UST | 2336 |
| OC3P.12648.C1_s_at | UST | 2337 |
| OC3SNGnh.17987_at | WBSCR17 | 2338 |
| OC3P.9629.C1_at | WBSCR17 | 2339 |
| OC3P.9629.C1_x_at | WBSCR17 | 2340 |
| OC3SNGnh.17288_x_at | WBSCR17 | 2341 |
| OC3SNGnh.14607_x_at | WBSCR17 | 2342 |
| OC3SNGnh.16415_x_at | WBSCR17 | 2343 |
| OCADA.2335_s_at | WBSCR17 | 2344 |
| OCADNP.4201_s_at | WBSCR17 | 2345 |
| OC3SNG.441-49a_s_at | WBSCR17 | 2346 |
| OCADA.7193_s_at | WBSCR17 | 2347 |
| OCADA.12324_s_at | WBSCR17 | 2348 |
| OC3SNGnh.14607_at | WBSCR17 | 2349 |
| OCADA.1886_s_at | ZNF426 | 2350 |
| OCADA.10995_x_at | ZNF426 | 2351 |
| OC3SNGnh.10916_x_at | ZNF426 | 2352 |
| OC3SNGnh.16594_x_at | ZNF532 | 2353 |
| OC3SNGnh.16594_at | ZNF532 | 2354 |
| OC3SNGn.321-1659a_s_at | ZNF532 | 2355 |
| OC3SNGn.5828-8a_x_at | ZNF532 | 2356 |
| OC3SNGnh.13417_x_at | ZNF532 | 2357 |
| OC3P.6619.C1_s_at | ZNF532 | 2358 |
| OC3P.12402.C1_s_at | ZNF532 | 2359 |
| OC3SNGnh.2646_x_at | ZNF720 | 2360 |
| OC3SNGnh.17078_s_at | ZNF720 | 2361 |
| OCADA.6654_s_at | ZNF720 | 2362 |
| OC3SNGn.8203-1695a_s_at | ZNF720 | 2363 |
| OC3SNGn.8204-2035a_s_at | ZNF720 | 2364 |
| OC3SNGnh.14440_s_at | ZNF818P | 2365 |

[0123] The method may comprise measuring the expression levels of at least one of MTL1, GABRE, KCND2, UPK2, HLA-DPA1, SYTL4, SCEL, MZT1, EFNB3, and DLL1. In specific embodiments the method comprises measuring the expression levels of each of MTL1, GABRE, KCND2, UPK2, HLA-DPA1, SYTL4, SCEL, MZT1, EFNB3, and DLL1. In further embodiments the method comprises measuring the expression levels of each of the biomarkers listed in Table L.

[0124] Methods for determining the expression levels of the biomarkers are described in greater detail herein. Typically, the methods may involve contacting a sample obtained from a subject with a detection agent, such as primers/probes/antibodies (as discussed in detail herein) specific for the biomarker and detecting expression products.

[0125] According to all aspects of the invention the expression level of the gene or genes may be measured by any suitable method. Genes may also be referred to, interchangeably, as biomarkers. In certain embodiments the expression level is determined at the level of protein, RNA or epigenetic modification. The epigenetic modification may be DNA methylation.

[0126] The expression level may be determined by immunohistochemistry. By Immunohistochemistry is meant the detection of proteins in cells of a tissue sample by using a binding reagent such as an antibody or aptamer that binds specifically to the proteins.

[0127] Accordingly, in a further aspect, the present invention relates to an antibody or aptamer that binds specifically to a protein product of at least one of the biomarkers listed herein.

[0128] The antibody may be of monoclonal or polyclonal origin. Fragments and derivative antibodies may also be utilised, to include without limitation Fab fragments, ScFv, single domain antibodies, nanoantibodies, heavy chain antibodies, aptamers etc. which retain peptide-specific binding function and these are included in the definition of “antibody”. Such antibodies are useful in the methods of the invention. They may be used to measure the level of a particular protein, or in some instances one or more specific isoforms of a protein. The skilled person is well able to identify epitopes that permit specific isoforms to be discriminated from one another.

[0129] Methods for generating specific antibodies are known to those skilled in the art. Antibodies may be of human or non-human origin (e.g. rodent, such as rat or mouse) and be humanized etc. according to known techniques (Jones et al., Nature (1986) May 29-Jun. 4; 321(6069):522-5; Roguska et al., Protein Engineering, 1996, 9(10):895-904; and Studnicka et al., Humanizing Mouse Antibody Frameworks While Preserving 3-D Structure. Protein Engineering, 1994, Vol. 7, pg 805).

[0130] In certain embodiments the expression level is determined using an antibody or aptamer conjugated to a label. By label is meant a component that permits detection, directly or indirectly. For example, the label may be an enzyme, optionally a peroxidase, or a fluorophore.

[0131] Where the antibody is conjugated to an enzyme a chemical composition may be used such that the enzyme catalyses a chemical reaction to produce a detectable product. The products of reactions catalyzed by appropriate enzymes can be, without limitation, fluorescent, luminescent, or radioactive or they may absorb visible or ultraviolet light. Examples of detectors suitable for detecting such detectable labels include, without limitation, x-ray film, radioactivity counters, scintillation counters, spectrophotometers, colorimeters, fluorometers, luminometers, and densitometers. In certain embodiments a secondary antibody is used and the expression level is then determined using an unlabeled primary antibody that binds to the target protein and a secondary antibody conjugated to a label, wherein the secondary antibody binds to the primary antibody.

[0132] Additional techniques for determining expression level at the level of protein include, for example, Westem blot, immunoprecipitation, immunocytochemistry, mass spectrometry, ELISA and others (see ImmunoAssay: A Practical Guide, edited by Brian Law, published by Taylor & Francis, Ltd., 2005 edition). To improve specificity and sensitivity of an assay method based on immunoreactivity, monoclonal antibodies are often used because of their specific epitope recognition. Polyclonal antibodies have also been successfully used in various immunoassays because of their increased affinity for the target as compared to monoclonal antibodies.

[0133] Measuring mRNA in a biological sample may be used as a surrogate for detection of the level of the corresponding protein in the biological sample. Thus, the expression level of any of the genes described herein can also be detected by detecting the appropriate RNA.

[0134] Accordingly, in specific embodiments the expression level is determined by microarray, northern blotting, or nucleic acid amplification. Nucleic acid amplification includes PCR and all variants thereof such as real-time and end point methods and qPCR. Typically, PCR includes of a series of 20-40 repeated temperature changes (cycles) with each cycle generally including 2-3 discrete temperature steps for denaturation, annealing and elongation. The cycling is often preceded by a single temperature step (called hold) at a high temperature (>90° C.), and followed by one hold at the end for final product extension or brief storage. The temperatures used and the length of time they are applied in each cycle vary based on a variety of parameters, including the enzyme used for DNA synthesis, the concentration dNTPs in the reaction, and the melting temperature (Tm) of the primers. For DNA polymerases that require heat activation the first step is heating the reaction to a temperature of 94-98° C. for 1-9 minutes. Then the reaction is heated to 94-98° C. for 20-30 seconds, which produces single-stranded DNA molecules. Next the reaction temperature is lowered to 50-65° C. for 20-40 seconds allowing annealing of the primers to the single-stranded DNA template. Typically the annealing temperature is about 3-5° C. below the Tm of the primers used. The temperature of the elongation step depends on the DNA polymerase used e.g. Taq polymerase has its optimum activity temperature at 75-80° C. At this step the DNA polymerase synthesizes a new DNA strand complementary to the DNA template strand by adding dNTPs that are complementary to the template. The extension time depends both on the DNA polymerase used and on the length of the DNA fragment to be amplified—a thousand bases per minute is usual. A final elongation may be performed at a temperature of 70-74° C. for 5-15 minutes after the last PCR cycle to ensure that any remaining single-stranded DNA is fully extended. A final hold at 4-15° C. for an indefinite time may be employed for short-term storage of the reaction. Other nucleic acid amplification techniques are well known in the art, and include methods such as NASBA, 3SR and Transcription Mediated Amplification (TMA). Other suitable amplification methods include the ligase chain reaction (LCR), selective amplification of target polynucleotide sequences (U.S. Pat. No. 6,410,276), consensus sequence primed polymerase chain reaction (U.S. Pat. No. 4,437,975), arbitrarily primed polymerase chain reaction (WO 90/06995), invader technology, strand displacement technology, and nick displacement amplification (WO 2004/067726). This list is not intended to be exhaustive; any nucleic acid amplification technique may be used provided the appropriate nucleic acid product is specifically amplified. Design of suitable primers and/or probes is within the capability of one skilled in the art. Various primer design tools are freely available to assist in this process such as the NCBI Primer-BLAST tool. Primers and/or probes may be at least 15, 16, 17, 18, 19, 20, 21, 22, 23, 24 or 25 (or more) nucleotides in length. mRNA expression levels may be measured by reverse transcription quantitative polymerase chain reaction (RT-PCR followed with qPCR). RT-PCR is used to create a cDNA from the mRNA. The cDNA may be used in a qPCR assay to produce fluorescence as the DNA amplification process progresses. By comparison to a standard curve, qPCR can produce an absolute measurement such as number of copies of mRNA per cell. Northern blots, microarrays, Invader assays, and RT-PCR combined with capillary electrophoresis have all been used to measure expression levels of mRNA in a sample. See Gene Expression Profiling: Methods and Protocols, Richard A. Shimkets, editor, Humana Press, 2004.

[0135] RNA expression may be determined by hybridization of RNA to a set of probes. The probes may be arranged in an array. Microarray platforms include those manufactured by companies such as Affymetrix, Illumina and Agilent. Examples of microarray platforms manufactured by Affymetrix include the U133 Plus2 array, the Almac proprietary Xcel™ array and the Almac proprietary Cancer DSAs®, including the Ovarian Cancer DSA®. In specific embodiments a sample of target nucleic acids is first prepared from the initial nucleic acid sample being assayed, where preparation may include labeling of the target nucleic acids with a label, e.g., a member of a signal producing system. Following target nucleic acid sample preparation, the sample is contacted with the array under hybridization conditions, whereby complexes are formed between target nucleic acids that are complementary to probe sequences attached to the array surface. The presence of hybridized complexes is then detected, either qualitatively or quantitatively. Specific hybridization technology which may be practiced to generate the expression profiles employed in the subject methods includes the technology described in U.S. Pat. Nos. 5,143,854; 5,288,644; 5,324,633; 5,432,049; 5,470,710; 5,492,806; 5,503,980; 5,510,270; 5,525,464; 5,547,839; 5,580,732; 5,661,028; 5,800,992; the disclosures of which are herein incorporated by reference; as well as WO 95/21265; WO 96/31622; WO 97/10365; WO 97/27317; EP 373 203; and EP 785 280. In these methods, an array of “probe” nucleic acids that includes a probe for each of the biomarkers whose expression is being assayed is contacted with target nucleic acids as described above. Contact is carried out under hybridization conditions, e.g., stringent hybridization conditions as described above, and unbound nucleic acid is then removed. The resultant pattern of hybridized nucleic acids provides information regarding expression for each of the biomarkers that have been probed, where the expression information is in terms of whether or not the gene is expressed and, typically, at what level, where the expression data, i.e., expression profile, may be both qualitative and quantitative.

[0136] The methods described herein may further comprise extracting total nucleic acid or RNA from the sample. Suitable methods are known in the art and include use of commercially available kits such as RNeasy and GeneJET RNA purification kit.

[0137] The invention also relates to a system or device for performing a method as described herein.

[0138] In a further aspect, the present invention relates to a system or test kit for performing a method as described herein, comprising:
[0139] a) one or more testing devices for determining the expression level of at least 3 biomarkers in a sample from the subject, wherein at least two of the biomarkers are from Table A and at least one of the biomarkers is from Table B or at least two biomarkers in a sample from the subject
[0140] b) a processor; and
[0141] c) storage medium comprising a computer application that, when executed by the processor, is configured to:
   [0142] (i) access and/or calculate the determined expression levels of the at least 3 biomarkers in a sample from the subject, wherein at least two of the biomarkers are from Table A and at least one of the biomarkers is from Table B or the at least two biomarkers in the sample on the one or more testing devices
   [0143] (ii) calculate whether there is an increased or decreased level of the biomarkersin the sample; and
   [0144] (iii) output from the processor the selection of whether to administer an anti-angiogenic therapeutic agent to a subject having a cancer and/or a prediction of the responsiveness of a subject with cancer to an anti-angiogenic therapeutic agent and/or the clinical prognosis of a subject with cancer.

[0145] By testing device is meant a combination of components that allows the expression level of a gene to be determined. The components may include any of those described above with respect to the methods for determining expression level at the level of protein, RNA or epigenetic modification. For example the components may be antibodies, primers, detection agents and so on. Components may also include one or more of the following: microscopes, microscope slides, x-ray film, radioactivity counters, scintillation counters, spectrophotometers, colorimeters, fluorometers, luminometers, and densitometers.

[0146] In certain embodiments the system or test kit further comprises a display for the output from the processor.

[0147] The invention also relates to a computer application or storage medium comprising a computer application as defined above.

[0148] In certain example embodiments, provided is a computer-implemented method, system, and a computer program product for selection of whether to administer an anti-angiogenic therapeutic agent to a subject having a cancer and/or prediction of the responsiveness of a subject with cancer to an anti-angiogenic therapeutic agent and/or determining the clinical prognosis of a subject with cancer, in accordance with the methods described herein. For example, the computer program product may comprise a non-transitory computer-readable storage device having computer-readable program instructions embodied thereon that, when executed by a computer, cause the computer to select whether to administer an anti-angiogenic therapeutic agent to a subject having a cancer and/or a predict the responsiveness of a subject with cancer to an anti-angiogenic therapeutic agent and/or determine the clinical prognosis of a subject with cancer as described herein. For example, the computer executable instructions may cause the computer to:

[0149] (i) access and/or calculate the determined expression levels of the at least 3 biomarkers in a sample from the subject, wherein at least two of the biomarkers are from Table A and at least one of the biomarkers is from Table B or the at least two biomarkers in a sample on one or more testing devices;

[0150] (ii) calculate whether there is an increased or decreased level of the at least 3 biomarkers in a sample from the subject, wherein at least two of the biomarkers are from Table A and at least one of the biomarkers is from Table B or the at least two biomarkers in the sample; and,

[0151] (iii) provide an output regarding the selection of whether to administer an anti-angiogenic therapeutic agent to a subject having a cancer and/or a prediction of the responsiveness of a subject with cancer to an anti-angiogenic therapeutic agent and/or the clinical prognosis of a subject with cancer.

[0152] In certain example embodiments, the computer-implemented method, system, and computer program product may be embodied in a computer application, for example, that operates and executes on a computing machine and a module. When executed, the application may select whether to administer an anti-angiogenic therapeutic agent to a subject having a cancer and/or a predict the responsiveness of a subject with cancer to an anti-angiogenic therapeutic agent and/or determine the clinical prognosis of a subject with cancer, in accordance with the example embodiments described herein.

[0153] As used herein, the computing machine may correspond to any computers, servers, embedded systems, or computing systems. The module may comprise one or more hardware or software elements configured to facilitate the computing machine in performing the various methods and processing functions presented herein. The computing machine may include various internal or attached components such as a processor, system bus, system memory, storage media, input/output interface, and a network interface for communicating with a network, for example.

[0154] The computing machine may be implemented as a conventional computer system, an embedded controller, a laptop, a server, a customized machine, any other hardware platform, such as a laboratory computer or device, for example, or any combination thereof. The computing machine may be a distributed system configured to function using multiple computing machines interconnected via a data network or bus system, for example.

[0155] The processor may be configured to execute code or instructions to perform the operations and functionality described herein, manage request flow and address mappings, and to perform calculations and generate commands. The processor may be configured to monitor and control the operation of the components in the computing machine. The processor may be a general purpose processor, a processor core, a multiprocessor, a reconfigurable processor, a microcontroller, a digital signal processor (“DSP”), an application specific integrated circuit (“ASIC”), a graphics processing unit (“GPU”), a field programmable gate array (“FPGA”), a programmable logic device (“PLD”), a controller, a state machine, gated logic, discrete hardware components, any other processing unit, or any combination or multiplicity thereof. The processor may be a single processing unit, multiple processing units, a single processing core, multiple processing cores, special purpose processing cores, co-processors, or any combination thereof. According to certain example embodiments, the processor, along with other components of the computing machine, may be a virtualized computing machine executing within one or more other computing machines.

[0156] The system memory may include non-volatile memories such as read-only memory (“ROM”), programmable read-only memory (“PROM”), erasable programmable read-only memory (“EPROM”), flash memory, or any other device capable of storing program instructions or data with or without applied power. The system memory may also include volatile memories such as random access memory (“RAM”), static random access memory (“SRAM”), dynamic random access memory (“DRAM”), and synchronous dynamic random access memory (“SDRAM”). Other types of RAM also may be used to implement the system memory. The system memory may be implemented using a single memory module or multiple memory modules. While the system memory may be part of the computing machine, one skilled in the art will recognize that the system memory may be separate from the computing machine without departing from the scope of the subject technology. It should also be appreciated that the system memory may include, or operate in conjunction with, a non-volatile storage device such as the storage media.

[0157] The storage media may include a hard disk, a floppy disk, a compact disc read only memory (“CD-ROM”), a digital versatile disc (“DVD”), a Blu-ray disc, a magnetic tape, a flash memory, other non-volatile memory device, a solid state drive (“SSD”), any magnetic storage device, any optical storage device, any electrical storage device, any semiconductor storage device, any physical-based storage device, any other data storage device, or any combination or multiplicity thereof. The storage media may store one or more operating systems, application programs and program modules such as module, data, or any other information. The storage media may be part of, or connected to, the computing machine. The storage media may also be part of one or more other computing machines that are in communication with the computing machine, such as servers, database servers, cloud storage, network attached storage, and so forth.

[0158] The module may comprise one or more hardware or software elements configured to facilitate the computing machine with performing the various methods and processing functions presented herein. The module may include one or more sequences of instructions stored as software or firmware in association with the system memory, the storage media, or both. The storage media may therefore represent examples of machine or computer readable media on which instructions or code may be stored for execution by the processor. Machine or computer readable media may generally refer to any medium or media used to provide instructions to the processor. Such machine or computer readable media associated with the module may comprise a computer software product. It should be appreciated that a computer software product comprising the module may also be associated with one or more processes or methods for delivering the module to the computing machine via a network, any signal-bearing medium, or any other communication or delivery technology. The module may also comprise hardware circuits or information for configuring hardware circuits such as microcode or configuration information for an FPGA or other PLD.

[0159] The input/output (“I/O”) interface may be configured to couple to one or more external devices, to receive data from the one or more external devices, and to send data to the one or more external devices. Such external devices along with the various internal devices may also be known as peripheral devices. The I/O interface may include both electrical and physical connections for operably coupling the various peripheral devices to the computing machine or the processor. The I/O interface may be configured to communicate data, addresses, and control signals between the peripheral devices, the computing machine, or the processor. The I/O interface may be configured to implement any standard interface, such as small computer system interface (“SCSI”), serial-attached SCSI (“SAS”), fiber channel, peripheral component interconnect (“PCI”), PCI express (PCIe), serial bus, parallel bus, advanced technology attached (“ATA”), serial ATA (“SATA”), universal serial bus (“USB”), Thunderbolt, FireWire, various video buses, and the like. The I/O interface may be configured to implement only one interface or bus technology.

[0160] Alternatively, the I/O interface may be configured to implement multiple interfaces or bus technologies. The I/O interface may be configured as part of, all of, or to operate in conjunction with, the system bus. The I/O interface may include one or more buffers for buffering transmissions between one or more external devices, internal devices, the computing machine, or the processor.

[0161] The I/O interface may couple the computing machine to various input devices including mice, touch-screens, scanners, electronic digitizers, sensors, receivers, touchpads, trackballs, cameras, microphones, keyboards, any other pointing devices, or any combinations thereof. The I/O interface may couple the computing machine to various output devices including video displays, speakers, printers, projectors, tactile feedback devices, automation control, robotic components, actuators, motors, fans, solenoids, valves, pumps, transmitters, signal emitters, lights, and so forth.

[0162] The computing machine may operate in a networked environment using logical connections through the network interface to one or more other systems or computing machines across the network. The network may include wide area networks (WAN), local area networks (LAN), intranets, the Internet, wireless access networks, wired networks, mobile networks, telephone networks, optical networks, or combinations thereof. The network may be packet switched, circuit switched, of any topology, and may use any communication protocol.

[0163] Communication links within the network may involve various digital or an analog communication media such as fiber optic cables, free-space optics, waveguides, electrical conductors, wireless links, antennas, radio-frequency communications, and so forth. The processor may be connected to the other elements of the computing machine or the various peripherals discussed herein through the system bus. It should be appreciated that the system bus may be within the processor, outside the processor, or both. According to some embodiments, any of the processor, the other elements of the computing machine, or the various peripherals discussed herein may be integrated into a single device such as a system on chip (“SOC”), system on package (“SOP”), or ASIC device.

[0164] Embodiments may comprise a computer program that embodies the functions described and illustrated herein, wherein the computer program is implemented in a computer system that comprises instructions stored in a machine-readable medium and a processor that executes the instructions. However, it should be apparent that there could be many different ways of implementing embodiments in computer programming, and the embodiments should not be construed as limited to any one set of computer program instructions. Further, a skilled programmer would be able to write such a computer program to implement one or more of the disclosed embodiments described herein. Therefore, disclosure of a particular set of program code instructions is not considered necessary for an adequate understanding of how to make and use embodiments. Further, those skilled in the art will appreciate that one or more aspects of embodiments described herein may be performed by hardware, software, or a combination thereof, as may be embodied in one or more computing systems. Moreover, any reference to an act being performed by a computer should not be construed as being performed by a single computer as more than one computer may perform the act.

[0165] The example embodiments described herein can be used with computer hardware and software that perform the methods and processing functions described previously. The systems, methods, and procedures described herein can be embodied in a programmable computer, computer-executable software, or digital circuitry. The software can be stored on computer-readable media. For example, computer-readable media can include a floppy disk, RAM, ROM, hard disk, removable media, flash memory, memory stick, optical media, magneto-optical media, CD-ROM, etc. Digital circuitry can include integrated circuits, gate arrays, building block logic, field programmable gate arrays (FPGA), etc.

[0166] Reagents, tools, and/or instructions for performing the methods described herein can be provided in a kit. Such a kit can include reagents for collecting a tissue sample from a patient, such as by biopsy, and reagents for processing the tissue. The kit can also include one or more reagents for performing a expression level analysis, such as reagents for performing nucleic acid amplification, including RT-PCR and qPCR, NGS, northern blot, proteomic analysis, or immunohistochemistry to determine expression levels of biomarkers in a sample of a patient. For example, primers for performing RT-PCR, probes for performing northern blot analyses, and/or antibodies or aptamers, as discussed herein, for performing proteomic analysis such as Westem blot, immunohistochemistry and ELISA analyses can be included in such kits. Appropriate buffers for the assays can also be included. Detection reagents required for any of these assays can also be included. The kits may be array or PCR based kits for example and may include additional reagents, such as a polymerase and/or dNTPs for example. The kits featured herein can also include an instruction sheet describing how to perform the assays for measuring expression levels.

[0167] The kit may include one or more primer pairs complementary to at least one of the biomarkers described herein.

[0168] Informational material included in the kits can be descriptive, instructional, marketing or other material that relates to the methods described herein and/or the use of the reagents for the methods described herein. For example, the informational material of the kit can contain contact information, e.g., a physical address, email address, website, or telephone number, where a user of the kit can obtain substantive information about performing a gene expression analysis and interpreting the results.

[0169] The inventors have found that a range of signatures can point to the sub-type and can be identified using the teaching herein.

[0170] Accordingly, the invention also relates to a method of deriving a panel of at least 2 biomarkers, wherein the expression level(s) of the at least 2 biomarkers in a sample from a subject with a cancer allows the cancer to be allocated to a sub-type

[0171] (optionally) wherein the cancer sub-type is defined by the expression levels of the genes in Tables A and B

[0172] said method comprising the steps of:

[0173] sorting samples from a sample set of known pathology and/or clinical outcome on the basis of allocation to the sub-type

[0174] obtaining the expression profiles of the samples

[0175] analysing the expression profiles from the sample set using a mathematical model identifying from the results of the mathematical model one or more biomarkers expressed in the sample set that are most predictive of the cancer sub-type.

[0176] In certain embodiments the mathematical model is a parametric, non-parametric or semi-parametric model. In specific embodiments the mathematical model is Partial Least Squares (PLS), Shrinkage Discriminate Analysis (SDA), or Diagonal SDA (DSDA). Identifying from the results of the mathematical model one or more biomarkers expressed in the sample set that are most predictive of the cancer sub-type may comprise identifying one or more biomarkers for which area under the receiver operator characteristic curve (AUC) and/or Concordance Index (C-Index) are significant.

[0177] In certain embodiments the panel is derived by obtaining the expression profiles of samples from a sample set of known pathology and/or clinical outcome. The samples may originate from the same sample tissue type or different tissue types. As used herein an “expression profile” comprises a set of values representing the expression level for each biomarker analyzed from a given sample.

[0178] The expression profiles from the sample set are then analyzed using a mathematical model. Different mathematical models may be applied and include, but are not limited to, models from the fields of pattern recognition (Duda et al. Pattern Classification, 2^{nd} ed., John Wiley, New York 2001), machine learning (Schölkopf et al. Learning with Kernels, MIT Press, Cambridge 2002, Bishop, Neural Networks for Pattern Recognition, Clarendon Press, Oxford 1995), statistics (Hastie et al. The Elements of Statistical Learning, Springer, New York 2001), bioinformatics (Dudoit et al., 2002, J. Am. Statist. Assoc. 97:77-87, Tibshirani et al., 2002, Proc. Natl. Acad. Sci. USA 99:6567-6572) or chemometrics (Vandeginste, et al., Handbook of Chemometrics and Qualimetrics, Part B, Elsevier, Amsterdam 1998). The mathematical model identifies one or more biomarkers expressed in the sample set that are most predictive of the cancer sub-type. These one or more biomarkers define a panel or an expression signature. In certain example embodiments, the mathematical model defines a variable, such as a weight, for each identified biomarker. In certain example embodiments, the mathematical model defines a decision function. The decision function may further define a threshold score which separates the sample set into two classes such as, but not limited to, samples where the cancer belongs to the cancer sub-type and samples where the cancer does not belong to the sub-type. In one example embodiment, the decision function and panel or expression signature are defined using a linear classifier.

[0179] The overall expression data for a given sample may be normalized using methods known to those skilled in the art in order to correct for differing amounts of starting material, varying efficiencies of the extraction and amplification reactions.

[0180] In certain example embodiments, biomarkers useful for distinguishing between cancer subtypes can be determined by identifying biomarkers exhibiting the highest degree of variability between samples in the patient data set as determined using the expression detection methods and patient sample sets discussed above. Standard statistical methods known in the art for identifying highly variable data points in expression data may be used to identify the highly variable biomarkers. For example, a combined background and variance filter to the patient data set. The background filter is based on the selection of probe sets with expression E and expression variance var_{E} above the thresholds defined by background standard deviation σBg (from the Expression Console software) and quantile of the standard normal distribution z_{α} at a specified significance a probe sets were kept if:

E>log₂((zₐσ_{Bg})); log₂((var_{E})>2[log₂(σ_{Bg})−E−log₂(log(2))]

[0181] where a defines a significance threshold. In certain example embodiment, the significance threshold is 6.3·10⁻⁵. In another example embodiment, the significance threshold may be between 1.0·10⁻⁷ to 1.0·10⁻³.

[0182] In certain example embodiments, the highly variable biomarkers may be further analyzed to group samples in the patient data set into subtypes or clusters based on similar gene expression profiles. For examples, biomarkers may be clustered based on how highly correlated the up-regulation or down-regulation of their expression is to one another. Different clustering analysis techniques may be applied to gene expression data and include, but are not limited to hierarchical clustering, inclusive of agglomerative and divisive methods (Eisen et al., 1998, PNAS 25:14863-14868), k-mean family clustering, inclusive of hard and fuzzy methods (Tavazoie et al., 1999, Nat Genet, 22281-285; Gasch and Eisen, 2002, Genome Biology 3: RESEARCH0059), self-organizing maps (SOM) (Tamayo et al., 1999, PNAS 96:2907-2912), methods based on graph theory (Sharan and Shamir, 2000, Proc Int Conf Intell Syst Mol Biol., 8:307-16), biclustering methods (Tanay et al., 2002, Bioinformatics 18: Suppl 1:S136-44), and ensemble methods (Dudoit et al. 2003, Bioinformatics, 19:1090-9). In one example embodiment, hierarchical agglomerative clustering is used to identify the cancer subtypes.

[0183] During clustering, determination of the similarity of features (sample, gene) requires the specification of a similarity matrix and methods used to calculate the similarity include, but are not limited to Euclidean distance, maximum distance, Manhattan distance, Minkowski distance, Canberra distance, binary distance, kendall's tau, Pearson correlation, Spearman correlation.

[0184] During hierarchical clustering, inter-cluster distances are defined by linkage functions. Several linkage functions can be used to calculate inter-cluster distances and include, but are not limited to single linkage (Sneath, 1957, Journal of General Microbiology, 17:201-226), complete linkage (McQuitty, 1960, Educational and Psychological Measurement, 20:55-67; Sokal and Sneath, 1963, Principles of Numerical Taxonomy, San Francisco:Freeman), UPGMA/group average (Sokal and Michener, 1958, University of Kansas Scientific Bulletin, 38:1409-1438), UPGMC/unweighted centroid (Lance and Williams, 1965, Computer Journal, 8246:249), WPGMC/weighted centroid (Gower, 1967, Biometrics, 30:623-637) and Ward's method of minimum variance (Ward, 1963, Journal of the American Statistical Association, 58:236-244).

[0185] To determine the biological relevance of each subtype, the biomarkers within each cluster may be further mapped to their corresponding genes and annotated by cross-reference to one or more databases referencing metabolic and signaling pathways, human gene functions and disease association, and/or ontological categories (e.g. biological processes, cellular components, molecular functions). In another example embodiment, biomarkers in clusters that are up regulated and enriched for immune response general functional terms are grouped into a putative non-angiongenesis sample group and used for expression signature generation. In another example embodiment, biomarkers in clusters that are down regulated and enriched for angiogenesis and vasculature development and are up regulated and enriched for immune response general functional terms are grouped into a putative non-angiongenesis sample group and used for expression signature generation. Further details for conducting functional analysis of biomarker clusters is provided in the Examples section below.

[0186] The following methods may be used to derive panels or expression signatures for distinguishing between cancers that belong to the sub-type or not or between subjects that are responsive or non-responsive to anti-angiogenic therapeutics, or as prognostic indicators of certain cancer types, including expression signatures derived from the biomarkers disclosed above. In certain other example embodiments, the panel or expression signature is derived using a decision tree (Hastie et al. The Elements of Statistical Learning, Springer, New York 2001), a random forest (Breiman, 2001 Random Forests, Machine Learning 45:5), a neural network (Bishop, Neural Networks for Pattern Recognition, Clarendon Press, Oxford 1995), discriminant analysis (Duda et al. Patter Classification, 2nd ed., John Wiley, New York 2001), including, but not limited to linear, diagonal linear, quadratic and logistic discriminant analysis, a Prediction Analysis for Microarrays (PAM, (Tibshirani et al., 2002, Proc. Natl. Acad. Sci. USA 99:6567-6572)) or a Soft Independent Modeling of Class Analogy analysis. (SIMCA, (Wold, 1976, Pattern Recogn. 8:127-139)). Classification trees (Breiman, Leo; Friedman, J. H.; Olshen, R. A.; Stone, C. J. (1984). Classification and regression trees. Monterey, Calif.: Wadsworth & Brooks/Cole Advanced Books & Software. ISBN 978-0-412-04841-8) provide a means of predicting outcomes based on logic and rules. A classification tree is built through a process called binary recursive partitioning, which is an iterative procedure of splitting the data into partitions/branches. The goal is to build a tree that distinguishes among pre-defined classes. Each node in the tree corresponds to a variable. To choose the best split at a node, each variable is considered in turn, where every possible split is tried and considered, and the best split is the one which produces the largest decrease in diversity of the classification label within each partition. This is repeated for all variables, and the winner is chosen as the best splitter for that node. The process is continued at the next node and in this manner, a full tree is generated. One of the advantages of classification trees over other supervised learning approaches such as discriminant analysis, is that the variables that are used to build the tree can be either categorical, or numeric, or a mix of both. In this way it is possible to generate a classification tree for predicting outcomes based on say the directionality of gene expression. Random forest algorithms (Breiman, Leo (2001). “Random Forests”. Machine Learning 45 (1): 5-32. doi:10.1023/A:1010933404324) provide a further extension to classification trees, whereby a collection of classification trees are randomly generated to form a “forest” and an average of the predicted outcomes from each tree is used to make inference with respect to the outcome.

[0187] Biomarker expression values may be defined in combination with corresponding scalar weights on the real scale with varying magnitude, which are further combined through linear or non-linear, algebraic, trigonometric or correlative means into a single scalar value via an algebraic, statistical leaming, Bayesian, regression, or similar algorithms which together with a mathematically derived decision function on the scalar value provide a predictive model by which expression profiles from samples may be resolved into discrete classes of responder or non-responder, resistant or non-resistant, to a specified drug, drug class, molecular subtype, or treatment regimen. Such predictive models, including biomarker membership, are developed by learning weights and the decision threshold, optimized for sensitivity, specificity, negative and positive predictive values, hazard ratio or any combination thereof, under cross-validation, bootstrapping or similar sampling techniques, from a set of representative expression profiles from historical patient samples with known drug response and/or resistance.

[0188] In one embodiment, the biomarkers are used to form a weighted sum of their signals, where individual weights can be positive or negative. The resulting sum (“expression score”) is compared with a pre-determined reference point or value. The comparison with the reference point or value may be used to diagnose, or predict a clinical condition or outcome.

[0189] In certain example embodiments, the panel or expression signature is defined by a decision function. A decision function is a set of weighted expression values derived using a linear classifier. All linear classifiers define the decision function using the following equation:

f(x)=w′·x+b=Σwᵢ·xᵢ+b (1)

[0190] All measurement values, such as the microarray gene expression intensities xᵢ, for a certain sample are collected in a vector x. Each intensity is then multiplied with a corresponding weight wᵢ to obtain the value of the decision function f(x) after adding an offset term b. In deriving the decision function, the linear classifier will further define a threshold value that splits the gene expression data space into two disjoint sections. Example linear classifiers include but are not limited to partial least squares (PLS), (Nguyen et al., Bioinformatics 18 (2002) 39-50), support vector machines (SVM) (Schölkopf et al., Learning with Kernels, MIT Press, Cambridge 2002), and shrinkage discriminant analysis (SDA) (Ahdesmäki et al., Annals of applied statistics 4, 503-519 (2010)). In one example embodiment, the linear classifier is a PLS linear classifier.

[0191] The decision function is empirically derived on a large set of training samples, for example from patients showing a good or poor clinical prognosis. The threshold separates a patient group based on different characteristics such as, but not limited to, clinical prognosis before or after a given therapeutic treatment. The interpretation of this quantity, i.e. the cut-off threshold, is derived in the development phase (“training”) from a set of patients with known outcome. The corresponding weights and the responsiveness/resistance cut-off threshold for the decision score are fixed a priori from training data by methods known to those skilled in the art. In one example embodiment, Partial Least Squares Discriminant Analysis (PLS-DA) is used for determining the weights. (L. Ståhle, S. Wold, J. Chemom. 1 (1987) 185-196; D. V. Nguyen, D. M. Rocke, Bioinformatics 18 (2002) 39-50).

[0192] Effectively, this means that the data space, i.e. the set of all possible combinations of biomarker expression values, is split into two mutually exclusive groups corresponding to different clinical classifications or predictions, for example, one corresponding to good clinical prognosis and poor clinical prognosis. In the context of the overall classifier, relative over-expression of a certain biomarker can either increase the decision score (positive weight) or reduce it (negative weight) and thus contribute to an overall decision of, for example, a good clinical prognosis.

[0193] In certain example embodiments of the invention, the data is transformed non-linearly before applying a weighted sum as described above. This non-linear transformation might include increasing the dimensionality of the data. The non-linear transformation and weighted summation might also be performed implicitly, for example, through the use of a kernel function. (Schölkopf et al. Learning with Kernels, MIT Press, Cambridge 2002).

[0194] In certain example embodiments, the patient training set data is derived by isolated RNA from a corresponding cancer tissue sample set and determining expression values by hybridizing the cDNA amplified from the isolated RNA to a microarray. In certain example embodiments, the microarray used in deriving the panel or expression signature is a transcriptome array. As used herein a “transcriptome array” refers to a microarray containing probe sets that are designed to hybridize to sequences that have been verified as expressed in the diseased tissue of interest. Given alternative splicing and variable poly-A tail processing between tissues and biological contexts, it is possible that probes designed against the same gene sequence derived from another tissue source or biological context will not effectively bind to transcripts expressed in the diseased tissue of interest, leading to a loss of potentially relevant biological information. Accordingly, it is beneficial to verify what sequences are expressed in the disease tissue of interest before deriving a microarray probe set. Verification of expressed sequences in a particular disease context may be done, for example, by isolating and sequencing total RNA from a diseased tissue sample set and cross-referencing the isolated sequences with known nucleic acid sequence databases to verify that the probe set on the transcriptome array is designed against the sequences actually expressed in the diseased tissue of interest. Methods for making transcriptome arrays are described in United States Patent Application Publication No. 2006/0134663, which is incorporated herein by reference. In certain example embodiments, the probe set of the transcriptome array is designed to bind within 300 nucleotides of the 3′ end of a transcript. Methods for designing transcriptome arrays with probe sets that bind within 300 nucleotides of the 3′ end of target transcripts are disclosed in United States Patent Application Publication No. 2009/0082218, which is incorporated by reference herein. In certain example embodiments, the microarray used in deriving the gene expression profiles of the present invention is the Almac Ovarian Cancer DSA™ microarray (Almac Group, Craigavon, United Kingdom).

[0195] An optimal (linear) classifier can be selected by evaluating a (linear) classifier's performance using such diagnostics as “area under the curve” (AUC). AUC refers to the area under the curve of a receiver operating characteristic (ROC) curve, both of which are well known in the art. AUC measures are useful for comparing the accuracy of a classifier across the complete data range. (Linear) classifiers with a higher AUC have a greater capacity to classify unknowns correctly between two groups of interest (e.g., ovarian cancer samples and normal or control samples). ROC curves are useful for plotting the performance of a particular feature (e.g., any of the biomarkers described herein and/or any item of additional biomedical information) in distinguishing between two populations (e.g., individuals responding and not responding to a therapeutic agent). Typically, the feature data across the entire population (e.g., the cases and controls) are sorted in ascending order based on the value of a single feature. Then, for each value for that feature, the true positive and false positive rates for the data are calculated. The true positive rate is determined by counting the number of cases above the value for that feature and then dividing by the total number of positive cases. The false positive rate is determined by counting the number of controls above the value for that feature and then dividing by the total number of controls. Although this definition refers to scenarios in which a feature is elevated in cases compared to controls, this definition also applies to scenarios in which a feature is lower in cases compared to the controls (in such a scenario, samples below the value for that feature would be counted). ROC curves can be generated for a single feature as well as for other single outputs, for example, a combination of two or more features can be mathematically combined (e.g., added, subtracted, multiplied, etc.) to provide a single sum value, and this single sum value can be plotted in a ROC curve. Additionally, any combination of multiple features, in which the combination derives a single output value, can be plotted in a ROC curve. These combinations of features may comprise a test. The ROC curve is the plot of the true positive rate (sensitivity) of a test against the false positive rate (1-specificity) of the test.

[0196] In certain embodiments deriving a panel of at least 2 biomarkers, wherein the expression level(s) of the at least 2 biomarkers in a sample from a subject with a cancer allows the cancer to be allocated to a sub-type (optionally) wherein the cancer sub-type is defined by the expression levels of the genes in Tables A and B comprises obtaining the expression profiles of a training set of samples known to belong to the sub-type or not using microarray probes

[0197] mapping probes to genes and measuring gene expression using the log₂ transformation of the median probeset expression for each gene

[0198] within nested CV, performing quantile normalization following a pre-filtering to remove 75% of genes with low variance, low intensity, and high correlation to cDNA yield

[0199] ranking genes/features based on correlation adjusted t-scores² and discarding 10% of the least important genes until 5 genes remain

[0200] identifying a panel of at least 2 biomarkers for which AUC and C-Index (Concordance Index) for the Progression free survival (PFS) endpoint under cross-validation are significant.

[0201] In further embodiments deriving a panel of at least 2 biomarkers, wherein the expression level(s) of the at least 2 biomarkers in a sample from a subject with a cancer allows the cancer to be allocated to a sub-type (optionally) wherein the cancer sub-type is defined by the expression levels of the genes in Tables A and B comprises

[0202] obtaining the expression profiles of a training set of samples known to belong to the sub-type or not using microarray probes

[0203] mapping probes to genes and measuring gene expression using the log₂ transformation of the median probeset expression for each gene

[0204] within nested CV, performing quantile normalization following a pre-filtering to remove 75% of genes with low variance, low intensity, and high correlation to cDNA yield

[0205] using Recursive Feature Elimination (RFE) for feature reduction to discard 10% of the least important genes (based upon their discriminatory ability) until 5 genes remain

[0206] identifying a panel of at least 2 biomarkers for which AUC and C-Index (Concordance Index) for the Progression free survival (PFS) endpoint under cross-validation are significant.

[0207] The signatures/panels described herein may result from the application of the methods for deriving panels of biomarkers described herein.

[0208] According to all aspects of the invention the method may comprise allocating the cancer to the sub-type based on the expression level of a panel of one or more, optionally two or more, biomarkers derived using the method outlined above in a sample from the subject.

[0209] The example systems, methods, and acts described in the embodiments presented previously are illustrative, and, in alternative embodiments, certain acts can be performed in a different order, in parallel with one another, omitted entirely, and/or combined between different example embodiments, and/or certain additional acts can be performed, without departing from the scope and spirit of various embodiments. Accordingly, such alternative embodiments are included in the examples described herein.

[0210] Although specific embodiments have been described above in detail, the description is merely for purposes of illustration. It should be appreciated, therefore, that many aspects described above are not intended as required or essential elements unless explicitly stated otherwise.

[0211] Modifications of, and equivalent components or acts corresponding to, the disclosed aspects of the example embodiments, in addition to those described above, can be made by a person of ordinary skill in the art, having the benefit of the present disclosure, without departing from the spirit and scope of embodiments defined in the following claims, the scope of which is to be accorded the broadest interpretation so as to encompass such modifications and equivalent structures.

### DESCRIPTION OF THE FIGURES

[0212] FIG. 1: Heat map showing unsupervised hierarchical clustering of gene expression data using the 1040 most variable genes in the 265 Edinburgh high grade serous ovarian carcinomas. Gene expression across all samples is represented horizontally. Functional processes corresponding to each gene cluster are labeled along the right of the figure. Angio, Immune, and Angiolmmune subgroups are labeled for each of the sample clusters, and color coded along the top as described in the legend box.

[0213] FIG. 2: Kaplan-Meier analysis of subgroups with respect to overall survival as defined by unsupervised clustering analysis of 265 Edinburgh high grade serous ovarian carcinomas

[0214] FIG. 3: AUC performance for predicting the molecular subtype calculated at a range of feature lengths. The red circle depicts the mean AUC performance of the 1000 random sampling of genes and the green error bars represent −/+2 standard deviations from the mean.

[0215] FIG. 4: C-index performance measured using the signature scores within the control arm for predicting the overall survival at a range of feature lengths. The red circle depicts the mean C-index performance of the 1000 random sampling of genes and the green error bars represent −/+2 standard deviations from the mean.

[0216] FIG. 5: Hazard ratio (HR) performance within the samples predicted as “Immune” for predicting the overall survival at a range of feature lengths. The red circle depicts the mean HR performance of the 1000 random sampling of genes and the green error bars represent −/+2 standard deviations from the mean.

[0217] FIG. 6: Signature development: AUC of training set under CV.

[0218] FIG. 7: Signature development: C-Index of training set under CV.

[0219] FIG. 8: Signature development: HR of training set under CV.

[0220] FIG. 9: Signature development: HR of ICON7 SOC samples under CV.

[0221] FIG. 10: Signature development: C-Index of ICON7 SOC samples under CV.

[0222] FIG. 11: Signature development: HR of ICON7 Immune samples under CV.

[0223] FIG. 12: Signature development: HR of ICON7 ProAngio samples under CV.

[0224] FIG. 13: Core set analysis: Immune63GeneSig_CoreGenes_lnternalVal.png.

[0225] FIG. 14: Core set analysis: Immune63GeneSig_CoreGenes_Tothill.png.

[0226] FIG. 15: Core set analysis: Immune63GeneSig_CoreGenes_ICON7_SOC.png.

[0227] FIG. 16: Minimum gene set analysis: Immune63GeneSig_MinGenes_Tothill.png.

[0228] FIG. 17: ICON7 SOC: Minimum gene set analysis: Immune63GeneSig_MinGenes_ICON7_SOC.png.

[0229] FIG. 18: ICON7 Immune: Minimum gene set analysis: Immune63GeneSig_MinGenes_ICON7_Immune.png.

[0230] FIG. 19: AUC (area under the receiver operator characteristic curve) performance of the training set measured under 10 repeats of five-fold cross validation using for predicting the Immune subtype. The performance for predicting the Immune subtype (AUC) was very strong at larger feature lengths and decreases as the number of features gets smaller. A feature length of 121 genes has been selected, which yields a significant AUC of 90.05 [87.80, 92.29].

[0231] FIG. 20: C-Index (concordance index) performance of the training set measured under 10 repeats of five-fold cross validation for predicting PFS (Progression Free Survival). A feature length of 121 genes yields a significant C-Index of 39.87 [38.31, 41.43].

[0232] FIG. 21: Hazard Ratio (HR) performance of the ICON7 Standard of care (SOC) arm samples under 10 repeats of five-fold cross validation for the PFS endpoint. A feature length of 121 genes yields a significant HR of 0.55 [0.45, 0.67]. This demonstrates the prognostic utility of the signature in SOC samples.

[0233] FIG. 22: C-Index performance of the ICON7 Standard of care (SOC) arm samples under 10 repeats of five-fold cross validation for the PFS endpoint. A feature length of 121 genes yields a significant C-Index of 41.54 [39.94, 43.14]. This demonstrates the prognostic utility of the signature (independent of cut-off) in SOC samples.

[0234] FIG. 23: HR performance of the ICON7 Immune group (as identified by the 63 gene signature) samples under 10 repeats of five-fold cross validation for the PFS endpoint. A feature length of 121 genes yields a significant HR of 1.80 [1.46, 2.22] showing lack of benefit of the addition of bevacuzimab in the Immune group.

[0235] FIG. 24: Core gene set analysis results for the 121 gene signature in the Internal validation sample set. Genes highlighted in red have the largest negative impact on the HR performance when removed from the signature.

[0236] FIG. 25: Core gene set analysis results for the 121 gene signature in the Tothill data set. Genes highlighted in red have the largest negative impact on the HR performance when removed from the signature.

[0237] FIG. 26: Core gene set analysis results for the 121 gene signature in the ICON7 SOC data set. Genes highlighted in red have the largest negative impact on the HR performance when removed from the signature.

[0238] FIG. 27: Minimum gene analysis results for the 121 gene signature in the Tothill data set. A significant HR can be achieved using at least 11 of the signature genes.

[0239] FIG. 28: Minimum gene analysis results for the 121 gene signature in the ICON7 SOC sample set. A significant HR can be achieved using at least 4 of the signature genes.

[0240] FIG. 29: Minimum gene analysis results for the 121 gene signature in the ICON7 Immune sample set. A significant HR can be achieved using at least 11 of the signature genes.

[0241] FIG. 30: AUC (area under the receiver operator characteristic curve) performance of the training set measured under 10 repeats of five-fold cross validation using for predicting the Immune subtype. The performance for predicting the Immune subtype (AUC) was very strong at larger feature lengths and decreases as the number of features gets smaller. A feature length of 232 genes has been selected, which yields a significant AUC of 94.29 [93.16, 95.42].

[0242] FIG. 31: C-Index (concordance index) performance of the training set measured under 10 repeats of five-fold cross validation for predicting PFS (Progression Free Survival). A feature length of 232 genes yields a significant C-Index of 39.35 [38.43, 40.27].

[0243] FIG. 32: Hazard Ratio (HR) performance of the ICON7 Standard of care (SOC) arm samples under 10 repeats of five-fold cross validation for the PFS endpoint. A feature length of 232 genes yields a significant HR of 0.57 [0.48, 0.67]. This demonstrates the prognostic utility of the signature in SOC samples.

[0244] FIG. 33: C-Index performance of the ICON7 Standard of care (SOC) arm samples under 10 repeats of five-fold cross validation for the PFS endpoint. A feature length of 232 genes yields a significant C-Index of 40.81 [39.52, 42.10]. This demonstrates the prognostic utility of the signature (independent of cut-off) in SOC samples.

[0245] FIG. 34: HR performance of the ICON7 Immune group (as identified by the 63 gene signature) samples under 10 repeats of five-fold cross validation for the PFS endpoint. A feature length of 232 genes yields a significant HR of 1.63 [1.39, 1.99] showing lack of benefit of the addition of bevacuzimab in the Immune group.

[0246] FIG. 35: Core gene set analysis results for the 232 gene signature in the Internal validation sample set. Genes highlighted in red have the largest negative impact on the HR performance when removed from the signature.

[0247] FIG. 36: Core gene set analysis results for the 232 gene signature in the Tothill data set. Genes highlighted in red have the largest negative impact on the HR performance when removed from the signature.

[0248] FIG. 37: Core gene set analysis results for the 232 gene signature in the ICON7 SOC data set. Genes highlighted in red have the largest negative impact on the HR performance when removed from the signature.

[0249] FIG. 38: Minimum gene analysis results for the 232 gene signature in the Tothill data set. A significant HR can be achieved using at least 25 of the signature genes.

[0250] FIG. 39: Minimum gene analysis results for the 232 gene signature in the ICON7 SOC sample set. A significant HR can be achieved using at least 10 of the signature genes.

[0251] FIG. 40: Minimum gene analysis results for the 232 gene signature in the ICON7 Immune sample set. A significant HR can be achieved using at least 11 of the signature genes.

[0252] FIG. 41: Signature development: AUC of training set under CV.

[0253] FIG. 42: Signature development: C-Index of training set under CV.

[0254] FIG. 43: Signature development: HR of ICON7 SOC samples under CV.

[0255] FIG. 44: Signature development: C-Index of ICON7 SOC samples under CV.

[0256] FIG. 45: Signature development: HR of ICON7 Immune samples under CV.

[0257] FIG. 46: Signature development: HR of ICON7 ProAngio samples under CV.

[0258] FIG. 47: Core set analysis: Immune_188GeneSig_CoreGenes_InternalVal.png.

[0259] FIG. 48: Core set analysis: Immune_188GeneSig_CoreGenes_Tothill.png.

[0260] FIG. 49: Core set analysis: Immune_188GeneSig_CoreGenes_ICON7_SOC.png.

[0261] FIG. 50: Minimum gene set analysis: Immune_188GeneSig_MinGenes_Tothill.png.

[0262] FIG. 51: ICON7 SOC: Minimum gene set analysis: Immune_188GeneSig_MinGenes_ICON7 SOC.png.

[0263] FIG. 52: ICON7 Immune: Minimum gene set analysis: Immune_188GeneSig_MinGenes_ICON7 Immune.png.

### EXAMPLES

[0264] The present invention will be further understood by reference to the following experimental examples.

### Example 1: Tissue Processing, Hierarchical Clustering and Subtype Identification Tumor Material

[0265] A cohort of 287 macrodissected epithelial serous ovarian tumor FFPE tissue samples sourced from the NHS Lothian and University of Edinburgh.

[0266] Gene Expression Profiling from FFPE

[0267] Total RNA was extracted from macrodissected FFPE tissue using the High Pure RNA Paraffin Kit (Roche Diagnostics GmbH, Mannheim, Germany). RNA was converted into complementary deoxyribonucleic acid (cDNA), which was subsequently amplified and converted into single-stranded form using the SPIA® technology of the WT-Ovation™ FFPE RNA Amplification System V2 (NuGEN Technologies Inc., San Carlos, Calif., USA). The amplified single-stranded cDNA was then fragemented and biotin labeled using the FL-Ovation™ cDNA Biotin Module V2 (NuGEN Technologies Inc.). The fragmented and labeled cDNA was then hybridized to the Almac Ovarian Cancer DSA™. Almac's Ovarian Cancer DSA research tool has been optimised for analysis of FFPE tissue samples, enabling the use of valuable archived tissue banks. The Almac Ovarian Cancer DSA™ research tool is an innovative microarray platform that represents the transcriptome in both normal and cancerous ovarian tissues. Consequently, the Ovarian Cancer DSA™ provides a comprehensive representation of the transcriptome within the ovarian disease and tissue setting, not available using generic microarray platforms. Arrays were scanned using the Affymentrix Genechip® Scanner 7G (Affymetrix Inc., Santa Clara, Calif.).

[0268] Data Preparation

[0269] Quality Control (QC) of profiled samples was carried out using MAS5 pre-processing algorithm. Different technical aspects were addressed: average noise and background homogeneity, percentage of present call (array quality), signal quality, RNA quality and hybridization quality. Distributions and Median Absolute Deviation of corresponding parameters were analyzed and used to identify possible outliers.

[0270] Almac's Ovarian Cancer DSA™ contains probes that primarily target the area within 300 nucleotides from the 3′ end. Therefore standard Affymetrix RNA quality measures were adapted—for housekeeping genes intensities of 3′ end probe sets with ratios of 3′ end probe set intensity to the average background intensity were used in addition to usual 3′/5′ ratios. Hybridization controls were checked to ensure that their intensities and present calls conform to the requirements specified by Affymetrix.

[0271] Hierarchical Clustering and Functional Analysis

[0272] Sample pre-processing was carried out using Robust Multi-Array analysis (RMA) [Irizarry R A, Bolstad B M, Collin F, Cope L M, Hobbs B, Speed T P. Summaries of Affymetrix GeneChip probe level data. Nucleic acids research 2003; 31:015]. The data matrix was sorted by decreasing variance, decreasing intensity and increasing correlation to cDNA yield. Following filtering of probe sets correlated with cDNA yield, incremental subsets of the data matrix were tested for cluster stability: the GAP statistic [Tibshirani R, Walther G, Hastie T. Estimating the number of clusters in a data set via the gap statistic. J Roy Stat Soc B 2001; 63:411-23] was applied to calculate the number of sample and probe set clusters while the stability of cluster composition was assessed using partition comparison methods. The final most variable probe set list was determined based on the smallest and most stable data matrix for the selected number of sample cluster.

[0273] Following standardization of the data matrix to the median probe set expression values, agglomerative hierarchical clustering was performed using Euclidean distance and Ward's linkage method [Ward J H. Hierarchical Grouping to Optimize an Objective Function. Journal of the American Statistical Association 1963; 58:236-&.]. The optimal number of sample and probe set clusters was determined using the GAP statistic [Tibshirani R, Walther G, Hastie T. Estimating the number of clusters in a data set via the gap statistic. J Roy Stat Soc B 2001; 63:411-23]. The significance of the distribution of clinical parameter factor levels across sample clusters was assessed using ANOVA (continuous factor) or chi-squared analysis (discrete factor) and corrected for false discovery rate (product of p-value and number of tests performed). A corrected p-value threshold of 0.05 was used as criterion for significance. Ovarian Cancer DSA® probe sets were remapped to genes using an annotation pipeline based on Ensembl v60 [http://oct2012.archive.ensembl.org/]. Functional enrichment analysis was conducted to identify and rank biological entities which were found to be associated with the clustered gene sets using the Gene Ontology biological processes classification [Ashburner M, Ball C A, Blake J A, et al. Gene ontology: tool for the unification of biology. The Gene Ontology Consortium. Nature genetics 2000; 25:25-9]. Entities were ranked according to a statistically derived enrichment score [Cho R J, Huang M X, Campbell M J, et al. Transcriptional regulation and function during the human cell cycle. Nature genetics 2001; 27:48-54] and adjusted for multiple testing [Benjamini Y, Hochberg Y. Controlling the False Discovery Rate—a Practical and Powerful Approach to Multiple Testing. J Roy Stat Soc B Met 1995; 57:289-300]. A corrected p-value of 0.05 was used as significance threshold. The identified enriched processes were summarised into an overall group function for each probe set/gene cluster.

[0274] Defining the Core Genes

[0275] The core angiogenic and immune genes were defined by evaluating functional enrichment of the 136 immune and 350 angiogeneic probe sets that constitute the immune and angiogenic clusters from the unsupervised analysis of the 265 HGS samples was performed using Almac's Functional Enrichment Tool (FET) v1.1.0. The functions were ordered by p-value and the 100 most significant biological functions were looked at. Of these 100 significant functions the ones directly related to immune processes (immune response, inflamatory response, interferon, antigen processing) or angiogeneic processes (angiogenesis, vasculature development, system development) were kept and the genes involved in each process were kept and remapped to the ovarian array resulting in the 238 core functional genes (77 immune, 161 angiogenesis)

[0276] Results

[0277] 265 HGS tumors passed microarray QC and subsequently underwent unsupervised hierarchical clustering based on 1400 most variable probe sets (corresponding to 1040 genes). Three sample clusters and four gene clusters were identified (FIG. 1). There was no significant association between HGS clusters and clinico-pathological features. Functional analysis (FIG. 1) revealed that cluster HGS3 was characterized by up regulation of genes associated with immune response and angiogenesis/vascular development (cluster referred to as Angioimmune forthwith). Cluster HGS1 was associated with upregulation of angiogenesis/vascular development (although apparently to a lesser extent than cluster HGS3) but without high expression of genes involved in immune response (cluster referred to as Angio forthwith). Cluster HGS2 was characterized by upregulation of genes involved in immune response without upregulation of genes involved in angiogenesis or vascular development (cluster referred to as Immune forthwith).

[0278] Multivariable survival analysis according to subgroup revealed that the patients in the Immune cluster had significantly prolonged OS compared to both patients in the Angioimmune (HR-0.58 [0.41-0.82], padj=0.001) and Angio clusters (HR-0.55 [0.37−0.80], padj=0.001). Kaplan-Meier curves are shown in FIG. 2 (univariable HR and p-values are shown).

[0279] Since patients in the Immune cluster had a significantly better outcome than those in the other clusters we proceeded to develop an assay to prospectively identify these patients in the clinic. In addition, given the low expression of angiogenic genes in the immune cluster, we hypothesized that this assay may identify a population that would not benefit from therapies targeting angiogenesis, although it would require additional datasets to test this theory. For the purpose of signature generation the Angio and Angioimmune clusters were grouped together and labeled as the “pro-angiogenic” group.

### Example 2: Determining the Minimum Number of Core Genes Required to Identify the Subtype

### Methods

[0280] The core set of genes to define the “Immune” subtype comprise 161 angiogenesis related probesets and 77 immune related probesets. The general pattern of expression to define the subtype is up-regulation of immune probesets and down-regulation of angiogenesis probesets.

[0281] Scoring Method for Predicting the Immune Subtype

[0282] A scoring method was derived to enable classification of patients into one of either the Immune or Pro-Angiogenic subtypes. The scoring method is based on the following, using the 265 high grade serous (HGS) samples that were used to discovery the subtype:
[0283] Median centre the probeset expression of the RMA (Robust Multi Array) pre-processed data.
[0284] To score each sample, calculate the average expression of the 161 angiogenesis probesets subtract from the average expression of the 77 immune probesets.
[0285] A score of 0 is used to dichotomise samples into either Immune (greater than 0) or Pro-angiogenic (less than 0).

[0286] Minimum Number of Genes Required

[0287] The ratio of Immune:Angiogenesis probesets is approximately 2:1, therefore in evaluating the minimum number of probesets required to classify samples into the Immune or Pro-angiogenic subtype, it is assumed that a 2:1 ratio should be maintained.

[0288] The minimum number of features considered were 3 (2 angio and 1 immune) increasing by three at each iteration up to 228 (maintaining the 2:1 ratio). At each feature length 1000 random samplings of the probesets was performed, and the 265 HGS samples were scored by the signature as described above.

[0289] The performance of the signatures was measured by the following:
[0290] The discrimination between the Immune and Pro-angiogenic groups based on the signature scores in the 265 HGS samples, measured using area under the receiver operator characteristic curve (AUC)
[0291] The Concordance-index (C-index) in the ICON7 clinical trial control arm samples, measuring the discrimination of overall survival (OS)
[0292] The hazard ratio of the treatment effect on OS in the Immune group, as predicted by the signature

[0293] Results

[0294] Scoring Method for Predicting the Immune Subtype

[0295] The scoring method applied to all samples using all core probesets resulted in an AUC performance against the subtype endpoint of 0.89 [0.85−0.93].

[0296] Minimum Number of Genes Required

[0297] FIG. 3 shows the AUC performance for predicting the subtype using a minimum of 3 probesets up to 228 probesets, where the 2:1 ratio of angiogenesis to immune probesets was maintained across all signatures. At a minimum of 3 probesets, the AUC performance is still significantly greater than 0.5 suggesting that with the use of a minimum of 2 angiogenesis probesets and 1 immune probeset, it is possible to predict the molecular subgroup significantly better than by chance.

[0298] FIG. 4 shows the C-index performance at a range of feature lengths in the ICON7 control samples measured against OS. A C-index that is significantly less than 0.5 is reflective of a survival advantage in patients with higher scores over those with lower scores. The results in FIG. 4 show that with a minimum of 2 angiogenesis probesets and 1 immune probeset the C-index is significantly lower than 0.5, therefore the survival differences in the control arm are evident with a minimum of 3 probesets.

[0299] FIG. 5 shows the HR of the treatment effect on OS in the immune group as predicted by the signatures at each feature length. A HR greater than 1.0 is reflective of a survival disadvantage in patients who received the treatment in addition to standard of care. With a minimum of 3 probesets the survival differences are evident between the treated with Avastin and control arm, with a HR significantly greater than 1.0.

### Example Signature 1: Immune 63 Gene Signature

### Samples

[0300] Internal training samples: This sample set comprised of 193 High Grade Serous Ovarian samples retrieved from the Edinburgh Ovarian Cancer Database
[0301] Tothill samples: This is a publically available dataset, from which 152 High Grade Serous Ovarian samples were used for analysis
[0302] ICON7 samples: This sample set comprises of 284 High Grade Serous samples from a phase III randomized trial of carboplatin and paclitaxel with or without bevacizumab first line cancer treatment which were accessed through the MRC (Medical Research Council).
   [0303] ICON7 SOC (Standard of Care)—140 samples— refers to patients who did not receive the addition of bevacizumab
   [0304] ICON7 Immune group—116 samples: this refers to the ICON7 samples predicted in the Immune group by the Immune 63 gene signature
   [0305] ICON7 ProAngio group—168 samples: this refers to the ICON7 samples predicted in the ProAngiogenesis group by the Immune 63 gene signature

[0306] Methods:

[0307] Signature Development

[0308] A balanced sample set of 193 Ovarian HGS samples were used to develop the signature using the PLS¹⁹ (Partial Least Squares) method during 10 repeats of 5-fold cross validation (CV). The following steps were used within signature development:
[0309] Probesets mapped to genes and gene expression measured using the log₂ transformation of the median probeset expression for each gene
[0310] Within nested CV, quantile normalization was performed following a pre-filtering to remove 75% of genes with low variance, low intensity, and high correlation to cDNA yield
[0311] Genes/features were ranking based on correlation adjusted t-scores² and feature reduction involved discarding 10% of the least important genes until 5 genes remained
[0312] The 63 gene signature was identified as the feature set for which the hazard ratio (HR) predicting Progression free survival (PFS) under cross-validation was optimal

[0313] The following datasets have been evaluated within CV to determine the performance of the 63 gene signature:
[0314] Internal training set—193 samples
[0315] ICON7 SOC (Standard of Care)—140 samples
[0316] ICON7 Immune group—116 samples
[0317] ICON7 ProAngio group—168 samples

[0318] Core Gene Analysis

[0319] The purpose of evaluating the core gene set of the signature is to determine a ranking for the genes based upon their impact on performance when removed from the signature.

[0320] This analysis involved 1,000,000 random samplings of 10 signature genes from the original 63 signature gene set. At each iteration, 10 randomly selected signature genes were removed and the performance of the remaining 53 genes was evaluated using the PFS endpoint to determine the impact on HR performance when these 10 genes were removed in the following 3 datasets:
[0321] Internal Validation—72 samples
[0322] Tothill HGS²¹ (High Grade Serous)—152 samples
[0323] ICON7 SOC (Standard of Care)—140 samples

[0324] Within each of these 3 datasets, the signature genes were weighted based upon the change in HR performance (Delta HR) based upon their inclusion or exclusion. Genes ranked ‘1’ have the most negative impact on performance when removed and those ranked ‘63’ have the least impact on performance when removed.

[0325] Minimum Gene Analysis

[0326] The purpose of evaluating the minimum number of genes is to determine if significant performance can be achieved within smaller subsets of the original signature.

[0327] This analysis involved 10,000 random samplings of the 63 signature genes starting at 1 gene/feature, up to a maximum of 25 genes/features. For each randomly selected feature length, the signature was redeveloped using the PLS machine learning method under CV and model parameters derived. At each feature length, all randomly selected signatures were applied to calculate signature scores for the following 3 datasets:
[0328] Tothill³ HGS (High Grade Serous)—152 samples
[0329] ICON7 SOC (Standard of Care)—140 samples
[0330] ICON7 Immune group—116 samples

[0331] Continuous signature scores were evaluated with PFS (Progression Free Survival) to determine the HR (Hazard Ratio) effect. The HR for all random signatures at each feature length was summarized and figures generated to visualize the performance over CV.

[0332] Results

[0333] Signature Development

[0334] This section presents the results of signature development within CV.
[0335] Internal training set: FIGS. 6, 7 & 8 show the AUC (Area under the receiver operating curve), C-Index (Concordance Index) & HR of the training set, from which the 63 gene signature was identified.
[0336] ICON7 SOC: FIGS. 9 & 10 show the HR and C-Index of the ICON7 SOC samples under CV.
[0337] ICON7 Immune group: FIG. 11 shows the HR of the ICON7 Immune samples (as identified by the 63 gene signature) under CV.
[0338] ICON7 ProAngio group: FIG. 12 shows the HR of the ICON7 ProAngio samples (as identified by the 63 gene signature) under CV.

[0339] Core Gene Analysis

[0340] The results for the core gene analysis of the 63 gene signature in 3 datasets is provided in this section.
[0341] Internal Validation: Delta HR performance measured in this dataset for the 63 signature genes is shown in FIG. 13. This figure highlights the top 10 ranked genes in the signature which are the most important in retaining a good HR performance within this dataset.
[0342] Tothill HGS: Delta HR performance measured in this dataset for the 63 signature genes is shown in FIG. 14. This figure highlights the top 10 ranked genes in the signature which are the most important in retaining a good HR performance within this dataset.
[0343] ICON7 SOC: Delta HR performance measured in this dataset for the 63 signature genes is shown in FIG. 15. This figure highlights the top 10 ranked genes in the signature which are the most important in retaining a good HR performance within this dataset.
[0344] Delta HR across these 3 datasets was evaluated to obtain a combined gene ranking for each of the signature genes. The ranks assigned to the signature genes based on the core set analysis have been outlined in Immune63GeneSig_CoreGenes_HR.txt.

[0345] Minimum Gene Analysis

[0346] The results for the minimum gene analysis of the 63 gene signature in 3 datasets is provided in this section.
[0347] Tothill HGS: The average HR performance measured in this dataset using the random sampling of the signature genes from a feature length of 1.25 is shown in FIG. 16. This figure shows that to retain a significant HR performance (i.e. HR<1) a minimum of 5 of the signature genes must be selected.
[0348] ICON7 SOC: The average HR performance measured in this dataset using the random sampling of the signature genes from a feature length of 1.25 is shown in FIG. 17. This figure shows that to retain a significant HR performance (i.e. HR<1) a minimum of 2 of the signature genes must be selected.
[0349] ICON7 Immune: The average HR performance measured in this dataset using the random sampling of the signature genes from a feature length of 1.25 is shown in FIG. 18. This figure shows that to retain a significant HR performance (i.e. HR<1) a minimum of 5 of the signature genes must be selected.
[0350] In summary, it is recommended that a minimum of at least 5 genes can be used and significant performance will be retained.

### Example Signature 2: Immune 121 Gene Signature

### Samples

[0351] Internal training samples: This sample set comprised of 193 High Grade Serous Ovarian samples retrieved from the Edinburgh Ovarian Cancer Database
[0352] Tothill samples: This is a publically available dataset, from which 152 High Grade Serous Ovarian samples were used for analysis
[0353] ICON7 samples: This sample set comprises of 284 High Grade Serous samples from a phase III randomized trial of carboplatin and paclitaxel with or without bevacizumab first line cancer treatment which were accessed through the MRC (Medical Research Council).
   [0354] ICON7 SOC (Standard of Care)—140 samples—refers to patients who did not receive the addition of bevacizumab
   [0355] ICON7 Immune group—116 samples: this refers to the ICON7 samples predicted in the Immune group by the Immune 63 gene signature
   [0356] ICON7 ProAngio group—168 samples: this refers to the ICON7 samples predicted in the ProAngiogenesis group by the Immune 63 gene signature

[0357] Methods:

[0358] Signature Development

[0359] A balanced sample set of 193 Ovarian HGS samples were used to develop the signature using the PLS¹⁹ (Partial Least Squares) method during 10 repeats of 5-fold cross validation (CV). The following steps were used within signature development:
[0360] Probesets mapped to genes and gene expression measured using the log₂ transformation of the median probeset expression for each gene
[0361] The Immune 63 signature genes (Example signature 1) were removed from the full set of genes
[0362] Within nested CV, quantile normalization was performed following a pre-filtering to remove 75% of genes with low variance, low intensity, and high correlation to cDNA yield
[0363] Genes/features were ranking based on correlation adjusted t-scores² and feature reduction involved discarding 10% of the least important genes until 5 genes remained
[0364] The 121 gene signature was identified as the smallest feature set for which AUC & C-Index (Concordance Index) for the Progression free survival (PFS) endpoint under cross-validation were optimal.

[0365] The following datasets have been evaluated within CV to determine the performance of the 121 gene signature:
[0366] Internal training set—193 samples
[0367] ICON7 SOC (Standard of Care)—140 samples
[0368] ICON7 Immune group—116 samples
[0369] ICON7 ProAngio group—168 samples

[0370] Core Gene Analysis

[0371] The purpose of evaluating the core gene set of the signature is to determine a ranking for the genes based upon their impact on performance when removed from the signature.

[0372] This analysis involved 1,000,000 random samplings of 10 signature genes from the original 121 signature gene set. At each iteration, 10 randomly selected signature genes were removed and the performance of the remaining 111 genes was evaluated using the PFS endpoint to determine the impact on HR performance when these 10 genes were removed in the following 3 datasets:
[0373] Internal Validation—72 samples
[0374] Tothill²¹ HGS (High Grade Serous)—152 samples
[0375] ICON7 SOC (Standard of Care)—140 samples

[0376] Within each of these 3 datasets, the signature genes were weighted based upon the change in HR performance (Delta HR) based upon their inclusion or exclusion. Genes ranked ‘1’ have the most negative impact on performance when removed and those ranked ‘121’ have the least impact on performance when removed.

[0377] Minimum Gene Analysis

[0378] The purpose of evaluating the minimum number of genes is to determine if significant performance can be achieved within smaller subsets of the original signature.

[0379] This analysis involved 10,000 random samplings of the 121 signature genes starting at 1 gene/feature, up to a maximum of 25 genes/features. For each randomly selected feature length, the signature was redeveloped using the PLS machine learning method under CV and model parameters derived. At each feature length, all randomly selected signatures were applied to calculate signature scores for the following 3 datasets:
[0380] Tothill²¹ HGS (High Grade Serous)—152 samples
[0381] ICON7 SOC (Standard of Care)—140 samples
[0382] ICON7 Immune group—116 samples

[0383] Continuous signature scores were evaluated with PFS (Progression Free Survival) to determine the HR (Hazard Ratio) effect. The HR for all random signatures at each feature length was summarized and figures generated to visualize the performance over CV.

[0384] Results

[0385] Signature Development

[0386] This section presents the results of signature development within CV.
[0387] Internal training set: FIGS. 19 & 20 show the AUC (Area under the receiver operating curve), C-Index for the training set, from which the 121 gene signature was identified.
[0388] ICON7 SOC: FIGS. 21 & 22 show the HR and C-Index of the ICON7 SOC samples under CV.
[0389] ICON7 Immune group: FIG. 23 shows the HR of the ICON7 Immune samples (Immune samples identified by the 63 gene signature) under CV.

[0390] Core Gene Analysis

[0391] The results for the core gene analysis of the 121 gene signature in 3 datasets are provided in this section.
[0392] Internal Validation: Delta HR performance measured in this dataset for the 121 signature genes is shown in FIG. 24. This figure highlights the top 10 ranked genes in the signature which are the most important in retaining a good HR performance within this dataset.
[0393] Tothill HGS: Delta HR performance measured in this dataset for the 121 signature genes is shown in FIG. 25. This figure highlights the top 10 ranked genes in the signature which are the most important in retaining a good HR performance within this dataset.
[0394] ICON7 SOC: Delta HR performance measured in this dataset for the 121 signature genes is shown in FIG. 26. This figure highlights the top 10 ranked genes in the signature which are the most important in retaining a good HR performance within this dataset.
[0395] Delta HR across these 3 datasets was evaluated to obtain a combined gene ranking for each of the signature genes. The ranks assigned to the signature genes based on the core set analysis have been outlined in Immune121GeneSig_CoreGenes_HR.txt.

[0396] Minimum Gene Analysis

[0397] The results for the minimum gene analysis of the 121 gene signature in 3 datasets are provided in this section.
[0398] Tothill HGS: The average HR performance measured in this dataset using the random sampling of the signature genes from a feature length of 1.25 is shown in FIG. 27. This figure shows that to retain a significant HR performance (i.e. HR<1) a minimum of 11 of the signature genes must be selected.
[0399] ICON7 SOC: The average HR performance measured in this dataset using the random sampling of the signature genes from a feature length of 1.25 is shown in FIG. 28. This figure shows that to retain a significant HR performance (i.e. HR<1) a minimum of 4 of the signature genes must be selected.
[0400] ICON7 Immune: The average HR performance measured in this dataset using the random sampling of the signature genes from a feature length of 1.25 is shown in FIG. 29. This figure shows that to retain a significant HR performance (i.e. HR<1) a minimum of 11 of the signature genes must be selected.
[0401] In summary, it is recommended that a minimum of at least 11 genes can be used and significant performance will be retained.

### Example Signature 3: Immune 232 Gene Signature

### Samples

[0402] Internal training samples: This sample set comprised of 193 High Grade Serous Ovarian samples retrieved from the Edinburgh Ovarian Cancer Database
[0403] Tothill samples: This is a publically available dataset, from which 152 High Grade Serous Ovarian samples were used for analysis
[0404] ICON7 samples: This sample set comprises of 284 High Grade Serous samples from a phase III randomized trial of carboplatin and paclitaxel with or without bevacizumab first line cancer treatment which were accessed through the MRC (Medical Research Council).
   [0405] ICON7 SOC (Standard of Care)—140 samples—refers to patients who did not receive the addition of bevacizumab
   [0406] ICON7 Immune group—116 samples: this refers to the ICON7 samples predicted in the Immune group by the Immune 63 gene signature
   [0407] ICON7 ProAngio group—168 samples: this refers to the ICON7 samples predicted in the ProAngiogenesis group by the Immune 63 gene signature

[0408] Methods:

[0409] Signature Development

[0410] A balanced sample set of 193 Ovarian HGS samples were used to develop the signature using the PLS¹⁹ (Partial Least Squares) method during 10 repeats of 5-fold cross validation (CV). The following steps were used within signature development:
[0411] Probesets mapped to genes and gene expression measured using the log₂ transformation of the median probeset expression for each gene
[0412] The Immune 63 (Example signature 1) & 121 (Example signature 2) signature genes were removed from the full set of genes prior to signature development
[0413] Within nested CV, quantile normalization was performed following a pre-filtering to remove 75% of genes with low variance, low intensity, and high correlation to cDNA yield
[0414] Genes/features were ranking based on correlation adjusted t-scores²⁰ and feature reduction involved discarding 10% of the least important genes until 5 genes remained
[0415] The 232 gene signature was identified as a feature set for which AUC & C-Index (Concordance Index) for the Progression free survival (PFS) endpoint under cross-validation were significant

[0416] The following datasets have been evaluated within CV to determine the performance of the 232 gene signature:
[0417] Internal training set—193 samples
[0418] ICON7 SOC (Standard of Care)—140 samples
[0419] ICON7 Immune group—116 samples
[0420] ICON7 ProAngio group—168 samples

[0421] Core Gene Analysis

[0422] The purpose of evaluating the core gene set of the signature is to determine a ranking for the genes based upon their impact on performance when removed from the signature.

[0423] This analysis involved 1,000,000 random samplings of 10 signature genes from the original 232 signature gene set. At each iteration, 10 randomly selected signature genes were removed and the performance of the remaining 222 genes was evaluated using the PFS endpoint to determine the impact on HR performance when these 10 genes were removed in the following 3 datasets:
[0424] Internal Validation—72 samples
[0425] Tothill²¹ HGS (High Grade Serous)—152 samples
[0426] ICON7 SOC (Standard of Care)—140 samples

[0427] Within each of these 3 datasets, the signature genes were weighted based upon the change in HR performance (Delta HR) based upon their inclusion or exclusion. Genes ranked ‘1’ have the most negative impact on performance when removed and those ranked ‘232’ have the least impact on performance when removed.

[0428] Minimum Gene Analysis

[0429] The purpose of evaluating the minimum number of genes is to determine if significant performance can be achieved within smaller subsets of the original signature.

[0430] This analysis involved 10,000 random samplings of the 232 signature genes starting at 1 gene/feature, up to a maximum of 25 genes/features. For each randomly selected feature length, the signature was redeveloped using the PLS machine learning method under CV and model parameters derived. At each feature length, all randomly selected signatures were applied to calculate signature scores for the following 3 datasets:
[0431] Tothill²¹ HGS (High Grade Serous)—152 samples
[0432] ICON7 SOC (Standard of Care)—140 samples
[0433] ICON7 Immune group—116 samples

[0434] Continuous signature scores were evaluated with PFS (Progression Free Survival) to determine the HR (Hazard Ratio) effect. The HR for all random signatures at each feature length was summarized and figures generated to visualize the performance over CV.

[0435] Results

[0436] Signature Development

[0437] This section presents the results of signature development within CV.
[0438] Internal training set: FIGS. 30 & 31 show the AUC (Area under the receiver operating curve), C-Index for the training set, from which the 232 gene signature was identified.
[0439] ICON7 SOC: FIGS. 32 & 33 show the HR and C-Index of the ICON7 SOC samples under CV.
[0440] ICON7 Immune group: FIG. 34 shows the HR of the ICON7 Immune samples (Immune samples identified by the 63 gene signature) under CV.

[0441] Core Gene Analysis

[0442] The results for the core gene analysis of the 232 gene signature in 3 datasets are provided in this section.
[0443] Internal Validation: Delta HR performance measured in this dataset for the 232 signature genes is shown in FIG. 35. This figure highlights the top 10 ranked genes in the signature which are the most important in retaining a good HR performance within this dataset.
[0444] Tothill HGS: Delta HR performance measured in this dataset for the 232 signature genes is shown in FIG. 36. This figure highlights the top 10 ranked genes in the signature which are the most important in retaining a good HR performance within this dataset.
[0445] ICON7 SOC: Delta HR performance measured in this dataset for the 232 signature genes is shown in FIG. 37. This figure highlights the top 10 ranked genes in the signature which are the most important in retaining a good HR performance within this dataset.
[0446] Delta HR across these 3 datasets was evaluated to obtain a combined gene ranking for each of the signature genes. The ranks assigned to the signature genes based on the core set analysis have been outlined in Immune232GeneSig_CoreGenes_HR.txt.

[0447] Minimum Gene Analysis

[0448] The results for the minimum gene analysis of the 232 gene signature in 3 datasets are provided in this section.
[0449] Tothill HGS: The average HR performance measured in this dataset using the random sampling of the signature genes from a feature length of 1.25 is shown in FIG. 38. This figure shows that to retain a significant HR performance (i.e. HR<1) a minimum of 25 signature genes must be selected.
[0450] ICON7 SOC: The average HR performance measured in this dataset using the random sampling of the signature genes from a feature length of 1.25 is shown in FIG. 39. This figure shows that to retain a significant HR performance (i.e. HR<1) a minimum of 10 of the signature genes must be selected.
[0451] ICON7 Immune: The average HR performance measured in this dataset using the random sampling of the signature genes from a feature length of 1.25 is shown in FIG. 40. This figure shows that to retain a significant HR performance (i.e. HR<1) a minimum of 11 of the signature genes must be selected.
[0452] In summary, it is recommended that a minimum of at least 25 genes can be used and significant performance will be retained.

### Example Signature 4: Immune 188 Gene Signature

### Samples

[0453] Internal training samples: This sample set comprised of 193 High Grade Serous Ovarian samples retrieved from the Edinburgh Ovarian Cancer Database
[0454] Tothill samples: This is a publically available dataset, from which 152 High Grade Serous Ovarian samples were used for analysis
[0455] ICON7 samples: This sample set comprises of 284 High Grade Serous samples from a phase III randomized trial of carboplatin and paclitaxel with or without bevacizumab first line cancer treatment which were accessed through the MRC (Medical Research Council).
   [0456] ICON7 SOC (Standard of Care)—140 samples—refers to patients who did not receive the addition of bevacizumab
   [0457] ICON7 Immune group—116 samples: this refers to the ICON7 samples predicted in the Immune group by the Immune 63 gene signature
   [0458] ICON7 ProAngio group—168 samples: this refers to the ICON7 samples predicted in the ProAngiogenesis group by the Immune 63 gene signature

[0459] Methods:

[0460] Signature Development

[0461] A balanced sample set of 193 Ovarian HGS samples were used to develop the signature using the SDA (Ahdesmaki, M. and Strimmer, K. (2010) Feature selection in omics prediction problems using cat scores and false non-discovery rate control Annals of applied statistics 4, 503-519) (Shrinkage Discriminate Analysis) method during 10 repeats of 5-fold cross validation (CV). The following steps were used within signature development:
[0462] Probesets mapped to genes and gene expression measured using the log₂ transformation of the median probeset expression for each gene
[0463] The Immune 63 signature genes were removed from the full set of genes prior to signature development
[0464] Within nested CV, quantile normalization was performed following a pre-filtering to remove 75% of genes with low variance, low intensity, and high correlation to cDNA yield
[0465] Recursive Feature Elimination (RFE) was used for feature reduction involved discarding the 10% of the least important genes (based upon their discriminatory ability) until 5 genes remained
[0466] The 188 gene signature was identified as a feature set for which AUC & C-Index (Concordance Index) for the Progression free survival (PFS) endpoint under cross-validation were significant

[0467] The following datasets have been evaluated within CV to determine the performance of the 188 gene signature:
[0468] Internal training set—193 samples
[0469] ICON7 SOC (Standard of Care)—140 samples
[0470] ICON7 Immune group—116 samples
[0471] ICON7 ProAngio group—168 samples

[0472] Core Gene Analysis

[0473] The purpose of evaluating the core gene set of the signature is to determine a ranking for the genes based upon their impact on performance when removed from the signature.

[0474] This analysis involved 1,000,000 random samplings of 10 signature genes from the original 188 signature gene set. At each iteration, 10 randomly selected signature genes were removed and the performance of the remaining 178 genes was evaluated using the PFS endpoint to determine the impact on HR performance when these 10 genes were removed in the following 3 datasets:
[0475] Internal Validation—72 samples
[0476] Tothill (Tothill R W, Tinker A V, George J, et al. Novel molecular subtypes of serous and endometrioid ovarian cancer linked to clinical outcome. Clin Cancer Res 2008; 14:5198-208) HGS (High Grade Serous)—152 samples
[0477] ICON7 SOC (Standard of Care)—140 samples

[0478] Within each of these 3 datasets, the signature genes were weighted based upon the change in HR performance (Delta HR) based upon their inclusion or exclusion. Genes ranked ‘1’ have the most negative impact on performance when removed and those ranked ‘188’ have the least impact on performance when removed.

[0479] Minimum Gene Analysis

[0480] The purpose of evaluating the minimum number of genes is to determine if significant performance can be achieved within smaller subsets of the original signature.

[0481] This analysis involved 10,000 random samplings of the 188 signature genes starting at 1 gene/feature, up to a maximum of 25 (or 35 in the case of Tothill dataset) genes/features. For each randomly selected feature length, the signature was redeveloped using the SDA machine learning method under CV and model parameters derived. At each feature length, all randomly selected signatures were applied to calculate signature scores for the following 3 datasets:
[0482] Tothill (Tothill R W, Tinker A V, George J, et al. Novel molecular subtypes of serous and endometrioid ovarian cancer linked to clinical outcome. Clin Cancer Res 2008; 14:5198-208) HGS (High Grade Serous)—152 samples
[0483] ICON7 SOC (Standard of Care)—140 samples
[0484] ICON7 Immune group—116 samples

[0485] Continuous signature scores were evaluated with PFS (Progression Free Survival) to determine the HR (Hazard Ratio) effect. The HR for all random signatures at each feature length was summarized and figures generated to visualize the performance over CV.

[0486] Results

[0487] Signature Development

[0488] This section presents the results of signature development within CV.
[0489] Internal training set: FIGS. 41 & 42 show the AUC (Area under the receiver operating curve), C-Index for the training set, from which the 188 gene signature was identified.
[0490] ICON7 SOC: FIGS. 43 & 44 show the HR and C-Index of the ICON7 SOC samples under CV.
[0491] ICON7 Immune group: FIG. 45 shows the HR of the ICON7 Immune samples (Immune samples identified by the 63 gene signature) under CV.
[0492] ICON7 ProAngio group: FIG. 46 shows the HR of the ICON7 ProAngio samples (ProAngio samples identified by the 63 gene signature) under CV.

[0493] Core Gene Analysis

[0494] The results for the core gene analysis of the 188 gene signature in 3 datasets is provided in this section.
[0495] Internal Validation: Delta HR performance measured in this dataset for the 188 signature genes is shown in FIG. 47. This figure highlights the top 10 ranked genes in the signature which are the most important in retaining a good HR performance within this dataset.
[0496] Tothill HGS: Delta HR performance measured in this dataset for the 188 signature genes is shown in FIG. 48. This figure highlights the top 10 ranked genes in the signature which are the most important in retaining a good HR performance within this dataset.
[0497] ICON7 SOC: Delta HR performance measured in this dataset for the 188 signature genes is shown in FIG. 49. This figure highlights the top 10 ranked genes in the signature which are the most important in retaining a good HR performance within this dataset.
[0498] Delta HR across these 3 datasets was evaluated to obtain a combined gene ranking for each of the signature genes. The ranks assigned to the signature genes based on the core set analysis has been outlined in Immune188GeneSig_CoreGenes_HR.txt.

[0499] Minimum Gene Analysis

[0500] The results for the minimum gene analysis of the 188 gene signature in 3 datasets is provided in this section.
[0501] Tothill HGS: The average HR performance measured in this dataset using the random sampling of the signature genes from a feature length of 1.35 is shown in FIG. 50. This figure shows that to retain a significant HR performance (i.e. HR<1) a minimum of 26 signature genes must be selected.
[0502] ICON7 SOC: The average HR performance measured in this dataset using the random sampling of the signature genes from a feature length of 1.25 is shown in FIG. 51. This figure shows that to retain a significant HR performance (i.e. HR<1) a minimum of 15 of the signature genes must be selected.
[0503] ICON7 Immune: The average HR performance measured in this dataset using the random sampling of the signature genes from a feature length of 1.25 is shown in FIG. 52. This figure shows that to retain a significant HR performance (i.e. HR<1) a minimum of 24 of the signature genes must be selected.
[0504] In summary, it is recommended that a minimum of at least 26 genes can be used and significant performance will be retained.

### REFERENCES

[0505] 1. Friedman H S, Prados M D, Wen P Y, et al. Bevacizumab alone and in combination with irinotecan in recurrent glioblastoma. J Clin Oncol, 27.4733-40 (2009).
[0506] 2. Hurwitz H, Fehrenbacher L, Novotny W, et al. Bevacizumab plus irinotecan, fluorouracil, and leucovorin for metastatic colorectal cancer. N Engl J Med, 3502335-42 (2004).
[0507] 3. Rini B I, Halabi S, Rosenberg J E, et al. Bevacizumab plus interferon alfa compared with interferon alfa monotherapy in patients with metastatic renal cell carcinoma: CALGB 90206. J Clin Oncol; 26.5422-8 (2008).
[0508] 4. Sandler A, Gray R, Perry M C, et al. Paclitaxel-carboplatin alone or with bevacizumab for non-small-cell lung cancer. N Engl J Med; 355: 2542-50 (2006).
[0509] 5. Wolmark N, Yothers G, O'Connell M J, et al. A phase III trial comparing mFOLFOX6 to mFOLFOX6 plus bevacizumab in stage II or III carcinoma of the colon: results of NSABP protocol C-08. J Clin Oncol; 27.LBA4 (2009).
[0510] 6. Yang J C, Haworth L, Sherry R M, et al., A randomized trial of bevacizumab, an antivascular endothelial growth factor antibody, for metastatic renal cancer, N Engl J Med 349 427-434 (2003).
[0511] 7. Willett C G, Boucher Y, di Tomaso E, et al., Direct evidence that the VEGF-specific antibody bevacizumab has antivascular effects in human rectal cancer, Nat. Med. 10, 145-147 (2004).
[0512] 8. Miller K, Wang M, Gralow J, et al., Paclitaxel plus bevacizumab versus paclitaxel alone for metastatic breast cancer, N Engl J Med 357 2666-2676 (2007).
[0513] 9. Miller K D, Chap L I, Holmes F A, et al., Randomized phase III trial of capecitabine compared with bevacizumab plus capecitabine in patients with previously treated metastatic breast cancer, J Clin Oncol 23 792-799 (2005).
[0514] 10. O'Shaughnessy J, Miles D, Gray R J, et al., A meta-analysis of overall survival data from three randomized trials of bevacizumab (BV) and first-line chemotherapy as treatment for patients with metastatic breast cancer (MBC), J Clin Oncol 28 (suppl) (abstr 1005) (2010).
[0515] 11. Reck M, von Pawel J, Zatloukal P, et al., Phase III trial of cisplatin plus gemcitabine with either placebo or bevacizumab as first-line therapy for nonsquamous non-small-cell lung cancer: AVAil, J Clin Oncol 27, 1227-1234 (2009).
[0516] 12. Escudier B, Bellmunt J, Negrier S et al., Phase III trial of bevacizumab plus interferon alfa-2a in patients with metastatic renal cell carcinoma (AVOREN): final analysis of overall survival, J Clin Oncol 28, 2144-2150 (2010)
[0517] 13. Burger R A, Sill M W, Monk B J, et al. Phase II trial of bevacizumab in persistent or recurrent epithelial ovarian cancer or primary peritoneal cancer: a Gynecologic Oncology Group Study. J Clin Oncol, 20; 25(33):5165-71 (2007).
[0518] 14 Tothill R W et al. Novel molecular subtypes of serous and endometrioid ovarian cancer linked to clinical outcome. Clin Cancer Res. 14(16), 5198-208 (2008).
[0519] 15. Bagri A, Berry L, Gunter B, et a. (2010) Effects of anti-VEGF treatment duration on tumor growth, tumor regrowth, and treatment efficacy. Clin Cancer Res 16:3887-3900.
[0520] 16. Ebos J M, Lee C R, Cruz-Munoz W, et al. (2009) Accelerated metastisis after short-term treatment with a potent inhibitor of tumor angiogenesis. Cancer Cell 15:232-239.
[0521] 17. Grepin R, Guyot M, Jacquin M, Durivault J, Chamorey E. Sudaka A, Serdjebi C, Lacarelle B. Scoazec J Y, Negrier S, Simmonet H, Pages G. Acceleration of clear cell renal cell carcinoma growth in mice following bevacizumab/Avastin treatment: the role of CXCL cytokines. Oncogene 2012 Mar. 29:31 (13).
[0522] 18. Ma J. Pulfer S, Li S, Chu J, Reed K, Gallo J M. Pharmacodynamic-mediated reducation of temozolomide tumor concentrations by the angiogenesis inhibitor TNP-470. Cancer Res. 2001; 61:5491-5498.
[0523] 19. Dejong S. Simpis—an Alternative Approach to Partial Least-Squares Regression. Chemometr Intell Lab 1993; 18:251-63.
[0524] 20. Zuber V, Strimmer K. Gene ranking and biomarker discovery under correlation. Bioinformatics 2009; 25:2700-7.
[0525] 21. Tothill R W, Tinker A V, George J, et al. Novel molecular subtypes of serous and endometrioid ovarian cancer linked to clinical outcome. Clin Cancer Res 2008; 14:5198-208.

The application's sequence listing, which the Patent Office published only in electronic form, follows.

SEQUENCE LISTING (2365 sequences)

SEQ ID NO: 1 - DNA, 227 bp, Homo sapiens
tatttgaactatatgttgaagacatctaccagtttctccaaatgccttttttaaaactcatcacagaagattggtgaaaatgctgagtatgacacttttcttcttgcatgcatgtcagctacataaacagttttgtacaatgaaaattactaatttgtttgacattccatgttaaactacggtcatgttcagcttcattgcatgtaatgtagacctagtccatcaga

SEQ ID NO: 2 - DNA, 263 bp, Homo sapiens
aatcaaccaatgcaaccagtttgtgagaaaaaaaaaaaaaagccgaaaaaaaaaaaaaaaaacacctgaatgcggaagagctcggctcccgtttagcattttgtacttaaggaaataaaaaaccaacaaaggatttcacatttttttaaaaagtgaagattgctgtatactatttattcaacttataatttatgttactccttgatctttgtcttttgtcatgacaaagcatttatttaataaagttatgcattcagcaactt

SEQ ID NO: 3 - DNA, 267 bp, Homo sapiens
ttgctttgtatgcactttgtttttttctttgggtcttgttttttttttccacttagaaattgcatttcctgacagaaggactcaggttgtctgaagtcactgcacagtgcatctcagcccacatagtgatggttcccctgttcactctacttagcatgtccctaccgagtctcttctccactggatggaggaaaaccaagccgtggcttcccgctcagccctccctgcccctcccttcaaccattccccatgggaaatgtcaacaag

SEQ ID NO: 4 - DNA, 238 bp, Homo sapiens
acccatcctgttcgtgaataggtctcaggggttgggggagggactgccagatttggacactatatttttttttaaattcaacttgaagatgtgtatttcccctgaccttcaaaaaatgttccaaggtaagcctcgtaaaggtcatcccaccatcaccaaagcctccgtttttaacaacctccaacacgatccatttagaggccaaatgtcattctgcaggtgccttcccgatggatta

SEQ ID NO: 5 - DNA, 227 bp, Homo sapiens
agcccaacttcttacccgaaagcatcactgccttggcccctccctcccggctgcccccatcacctctactgtctcctccctgggctaagcaggggagaagcgggctgggggtagcctggatgtgggccaagtccactgtcctccttggcggcaaaagcccattgaagaagaaccagcccagcctgccccctatcttgtcctggaatatttttggggttggaactcaa

SEQ ID NO: 6 - DNA, 108 bp, Homo sapiens
acatgcagtactgtataccccccatccctccctcggtccactgaacttcagagcagttcccattcctgccccgcccatctttttgtgtctcgctgtgatagatcaata

SEQ ID NO: 7 - DNA, 73 bp, Homo sapiens
tctgtaattcattgagcagttagctcatttgagataaagtcaaatgccaaacactagctctgtattaatcccc

SEQ ID NO: 8 - DNA, 146 bp, Homo sapiens
gctttgatatttcaatgttagcctcaatttctgaacaccataggtagaatgtaaagcttgtctgatcgttcaaagcatgaaatggatacttatatggaaattctgctcagatagaatgacagtccgtcaaaacagattgtttgcaa

SEQ ID NO: 9 - DNA, 161 bp, Homo sapiens
aatgaaattgttaattggccaggcacagtgggaagcacctgtagtcccagctactcaggaggctaaagtgagagggtggctctagcacagtcatcaaggctgcaggaggctatgatggagccactgcactccagcctagatgacaaggtgagacgctgtct

SEQ ID NO: 10 - DNA, 55 bp, Homo sapiens
atactggaaacctaactgcaatgtggatgttttacccacatgacttattatgcat

SEQ ID NO: 11 - DNA, 169 bp, Homo sapiens
tgttaaactttggaacacctaccaaaaaataagtttgataacatttaaaagatgggcgtttcccccaatgaaatacacaagtaaacattccaacattgtctttaggagtgatttgcaccttgcaaaaatggtcctggagttggtagattgctgttgatcttttatcaat

SEQ ID NO: 12 - DNA, 96 bp, Homo sapiens
catatattttttgctacttttgctgttttatttttttaaattatgttctaaacctattttcagtttaggtccctcaataaaaattgctgctgcttc

SEQ ID NO: 13 - DNA, 97 bp, Homo sapiens
ttctccccaaccacttagtagcaacgctaccccagggggtaatgactgcacactgggcttcttttcagaatgaccctaacgagacacatttgcccaa

SEQ ID NO: 14 - DNA, 164 bp, Homo sapiens
gtgtggatgctaaggtgtttgttttgttttgtatttttatgtagcgcgtgggtattgtgcctagaaatgaagtcattattagggatttaaatatgcaactcatggagtggatgagaccagctagaaagataatagagtgtgaagaggagatcggaaattcaata

SEQ ID NO: 15 - DNA, 179 bp, Homo sapiens
tgtggtagcctcacttttaatgaacaaatggcctttattaaaaactgagtgactctatatagctgatcagttttttcacctggaagcatttgtttttactttgatatgactgtttttcggacagtttatttgttgagagtgtgaccaaaagttacatgtttgcacctttttagttgaaa

SEQ ID NO: 16 - DNA, 286 bp, Homo sapiens
taaagacgcatgttatggtgctaatgtactttcacttttaaactctagatcagaattgttgacttgcattcagaacataaatgcacaaaatctgtacatgtctcccatcagaaagattcattggcatgccacaggggattctcctccttcatcctgtaaaggtcaacaataaaaaccaaattatggggctgcttttgtcacactagcatagagaatgtgttgaaatttaactttgtaagcttgtatgtggttgttgatcttttttttccttacagacacccataat

SEQ ID NO: 17 - DNA, 174 bp, Homo sapiens
gatcagcaaacaggaatacgatgaagccgggccttccattgtccaccgcaaatgcttctaaaacactttcctgctcctctctgtctctagcacacaactgtgaatgtcctgtggaattatgccttcagttcttttccaaatcattcctagccaaagctctgactcgttacctat

SEQ ID NO: 18 - DNA, 174 bp, Homo sapiens
ccatcagtttttccaatgtgaatggactggttcatatcacaccatatttagagatacaaggtgattataactaacgtgtctacaagacatactgggtcaaacaatgtgatcaatccaaagggtatctttttaaaaagaatttaagtactcagctgcaaagataagttcactaat

SEQ ID NO: 19 - DNA, 189 bp, Homo sapiens
ttaccctccaaaagcaagtagccaaagccgttgccaaaccccacccataaatcaatgggccctttatttatgacgactttatttattctaatatgattttatagtatttatatatattgggtcgtctgcttcccttgtatttttcttcctttttttgtaatattgaaaacgacgatataattattataa

SEQ ID NO: 20 - DNA, 151 bp, Homo sapiens
ttggaatgttgtagttacctactgagtaggcggcgatttttgtatgttatgaacatgcagttcattattttgtggttctattttactttgtacttgtgtttgcttaaacaaagtgactgtttggcttataaacacattgaatgcgctttat

SEQ ID NO: 21 - DNA, 236 bp, Homo sapiens
attggagtggatgggttctgccttaaattgggaggactccaagccgggaaggaaaattcccttttccaacctgtatcaatttttacaacttttttcctgaaagcagtttagtccatactttgcactgacatactttttccttctgtgctaaggtaaggtatccaccctcgatgcaatccaccttgtgttttcttagggtggaatgtgatgttcagcagcaaacttgcaacagactg

SEQ ID NO: 22 - DNA, 232 bp, Homo sapiens
tttgttagtacatttcagtgtagtcattcatttctagctgtacataggatgaaggagagatcagatacatgaacatgttttacatgggttgctgtatttagaattataaacatttttcattattggaaagtgtaacggggaccttttgcatacctgtttagaaccaaaaccaccatgacacagtttttatagtgtctgtatatttgtgatgcaatggtcttgtaaaggtttt

SEQ ID NO: 23 - DNA, 263 bp, Homo sapiens
gagatcacttggtaactggtttcatgtgtatccaaaaatcagcatttggatttaagctttctgaatttggtagtttaagaaacagatttagtttttcagtggttttaactcatgtgaaataatgattttccaccagctttgatgcaaagagatataattttaatgaacgatttatccagcagtttgttccaggggttgcctctccttatttacggggattactttgtacatgcagataagttttcgcaaacctatttccattt

SEQ ID NO: 24 - DNA, 252 bp, Homo sapiens
ggttctgtaaggtctttatttcccataagtaaatattgccatgggaggggggtggaggtggcaaggaaggggtgaagtgctagtatgcaagtgggcagcaattatttttgtgttaatcagcagtacaatttgatcgttggcatggttaaaaaatggaatataagattagctgttttgtattttgatgaccaattacgctgtattttaacacgatgtatgtctgtttttgtggtgctctagtggtaaataaat

SEQ ID NO: 25 - DNA, 157 bp, Homo sapiens
tatgaattccattcaaatcgttcctttttgttaacaaggggcatggggaggggtgggggtgggggggcagaggcgtctgaccccaggaacctgcagggcggggctgggtcggtgccctttaaggacaattttgaccttgttcaacctttccacaaag

SEQ ID NO: 26 - DNA, 178 bp, Homo sapiens
ctttggatagaggtgaagaacttggacatggctgtttcaggcagctgaagtcaaagggaatagtaattggggaaggggaagtgggcagaaaggattgttggccaatataccttccactccagtagagagggaggacttggctctgagaacctccatctgacctaagaggaaccctcct

SEQ ID NO: 27 - DNA, 300 bp, Homo sapiens
gatgataatctttactggtgaaaaggatggaaaaataaatcaacaaatgcaaccagtttgtgagaaaaaaaaaaaaaagccgaaaaaaaaaaaaaaaacacctgaatgcggaagagctcggctcccgtttagcattttgtacttaaggaaataaaaaaccaacaaaggatctcacattttcttaaaaagtgaagattgctgtatactatttattcaacttataatttatgttactccttgatctttgtcttttgtcatgacaaagcatttatttaataaagttatgcattcagttcccaa

SEQ ID NO: 28 - DNA, 202 bp, Homo sapiens
taatggttaacgaaccgggtcgacatcacaaaggagggtggagactctttttactaacttgaatgagacaaaagcagtggtgtcagtttataatcctgatgcatttcagtaataatgtagaaaaacattattttaaaaaagttccaacacacagccatgaggagcctcagttttgaaagaggtgcataataaaactactaac

SEQ ID NO: 29 - DNA, 234 bp, Homo sapiens
ctgtggcatgctcagaggttcctgctggattccagctggagcggtgtgatacccttctttttcagctgttcgtgccttcctttcttgtatccaccaaagtggagacaaatacatgatttcaaagatacacagtacctacttaattccagctgatgggagaccaaagaatttgcaagtggatggtttggtatcactgtaaataaaaagagggcctgggaattcttgcgattccat

SEQ ID NO: 30 - DNA, 117 bp, Homo sapiens
ttaaacagtctagagtgaagggaatgttttaaaatccagaggcgatcaagtgaagccaacctttggaggcccgtagaagtcatttggaggaatttggacttcgtgcagtaggaaaga

SEQ ID NO: 31 - DNA, 53 bp, Homo sapiens
gaccaggaattcggcttcgacgttggccctgtctgcttcctgtaaactccctc

SEQ ID NO: 32 - DNA, 151 bp, Homo sapiens
tgtaatgctaaaactgaaatggtccgtgtttgcattgttaaaaatgatgtgtgaaatagaatgagtgctatggtgttgaaaactgcagtgtccgttatgagtgccaaaaatttgtcttgaaggcagctacactttgaagtggtctttgaat

SEQ ID NO: 33 - DNA, 127 bp, Homo sapiens
aagagttaaacagtctagagtgaagggaatgttttaaaatccagaggcgatcaagtgaagccaacctttggaggcccgtagaagtcatttggaggaatttggacttcgtgcagtaggaaagagggaa

SEQ ID NO: 34 - DNA, 268 bp, Homo sapiens
gtaaagctttggcacatacagtataaaaaataatcacccaccataattataccaaattcctcttatcaactgcatactaagtgttttcaatacaattttttccgtataaaaatactgggaaaaattgataaataacaggtaagagaaagatatttctaggcaattactaggatcatttggaaaaagtgagtactgtggatatttaaaatatcacagtaacaagatcatgcttgttcctacagtattgcgggccagacacttaagtgaa

SEQ ID NO: 35 - DNA, 211 bp, Homo sapiens
gtcaggtcttggtaggtgcctgcatctgtctgccttctggctgacaatcctggaaatctgttctccagaatccaggccaaaaagttcacagtcaaatggggaggggtattcttcatgcaggagaccccaggccctggaggctgcaacatacctcaatcctgtcccaggccggatcctcctgaagcccttttcgcagcactgctatcctcca

SEQ ID NO: 36 - DNA, 239 bp, Homo sapiens
aagaacaactcctcaccagttcatcctgaggctgggaggaccgggatgctggattctgttttccgaagtcactgcagcggatgatggaactgaatcgatacggtgttttctgtccctcctactttccttcacaccagacagcccctcatgtctccaggacaggacaggactacagacaactctttctttaaataaattaagtctttacaataaaaacacaactgcaaagtaccttcata

SEQ ID NO: 37 - DNA, 99 bp, Homo sapiens
aattcatatcccctgttcgtctcatgcgcgtcctccgtccccaatctaaaaagcaattgaaaaggtctatgcaataaaggcagtcgcttcattcctctc

SEQ ID NO: 38 - DNA, 57 bp, Homo sapiens
tattgaggacccatggtaaaatgcaaatagatccggtgtctaaatgcattcatattt

SEQ ID NO: 39 - DNA, 237 bp, Homo sapiens
acaaaagctcccctgatccaactagcacactgtcaaatacagtgtcatatgagaggtccacagacggtagtttccaagaccgtttcagggaattcgaggattccaccttaaaacctaacagaaaaaaacccactgaaaatattatcatagacctggacaaagaggacaaggatttaatattgacaattacagagagtaccatccttgaaattctacctgagctgacatcggataaaa

SEQ ID NO: 40 - DNA, 211 bp, Homo sapiens
gaaaaaactttctctttgccatttcttcttcttcttttttaactgaaagctgaatccttccatttcttctgcacatctacttgcttaaattgtgggcaaaagagaaaaagaaggattgatcagagcattgtgcaatacagtttcattaactccttcccccgctcccccaaaaatttgaatttttttttcaacactcttacacctgttatgg

SEQ ID NO: 41 - DNA, 191 bp, Homo sapiens
aatctctttttttctggaggctggcacctgattttgtatccccctgtagcagcattactgaaatacataggcttatatacaatgcttctttcctgtatattctcttgtctggctgcacccctttttcccgcccccagattgataagtaatgaaagtgcactgcagtgagggtcaaaggagagtcaacatat

SEQ ID NO: 42 - DNA, 143 bp, Homo sapiens
cttgttcttttgaagcttgtgctgaggttttagcttttctatgttttatatgccgctgctttgaaagagaacctagattctatagttgtattattgttgtttcatactttaaatttatatggctgtggaaaaacgaattaaaa

SEQ ID NO: 43 - DNA, 237 bp, Homo sapiens
agaagacccacgtgctaggggatgaggggcttcctgggtcctgttccctaccccatttgtggtcacagccatgaagtcaccgggatgaacctatccttccagtggctcgctccctgtagctctgcctccctctccatatctccttcccctacacctccctccccacacctccctactcccctgggcatcttctggcttgactggatggaaggagacttaggaacctaccagttggcc

SEQ ID NO: 44 - DNA, 217 bp, Homo sapiens
gttcccagtgacacttcagagagctggtagttagtagcatgttgagccaggcctgggtctgtgtctcttttctctttctccttagtcttctcatagcattaactaatctattgggttcattattggaattaacctggtgctggatattttcaaattgtatctagtgcagctgattttaacaataactactgtgttcctggcaatagtgtgttctgat

SEQ ID NO: 45 - DNA, 32 bp, Homo sapiens
ttataatgagtgcgatatatgttgtcgaggct

SEQ ID NO: 46 - DNA, 132 bp, Homo sapiens
aaaagttcacagtcaaatggggaggggtatttttcatgcaggagaccccaggccctggaggctgcaacatacctcaatcctgtcccaggccggatcctcctgaagcccttttcgcagcactgctatcctcca

SEQ ID NO: 47 - DNA, 33 bp, Homo sapiens
aaacgatgataatctttactggtgaaaaggatg

SEQ ID NO: 48 - DNA, 191 bp, Homo sapiens
taggtggtagatattgaggccaagaatattgcaaaatacatgaagcttcatgcacttaaagaagtatttttagaataagaatttgcatacttacctagtgaaacttttctagaattatttttcactctaagtcatgtatgtttctctttgattatttgcatgttatgtttaataagctactagcaaaataa

SEQ ID NO: 49 - DNA, 257 bp, Homo sapiens
gaaagcctgagtttgcaaccagttgtagggtttttgttgtgttttttttttttttttgaaataaaactataatataaattctcctattaaataaaattattttaagttttagtgtcaaaagtgagatgctgagagtaggtgataatgtatattttacagagtgggggttggcaggatggtgacattgaacatgattgctctctgtctcttttttcagcttatgggtatttatcttctattagtatttgtatcttcag

SEQ ID NO: 50 - DNA, 100 bp, Homo sapiens
tgccccccttaaggctagaggtgagcatgtccctcacaattgcacatgtcaagccatcagcaaggcgcatcacacaaaaggcaccaagacgtgaaacttt

SEQ ID NO: 51 - DNA, 175 bp, Homo sapiens
tatttcttgctattgtgatatgacaagagacttaacttatcttgctctgttttcccctgtacacgctgtatataggggtcaatgtgatgctgctggagacgagaataaactggactagaatagtgcattgtatttagtctgtattgatcatggatgccctccttaatagccatat

SEQ ID NO: 52 - DNA, 76 bp, Homo sapiens
ggaggatgcgctgtggggttgtttttgccataagcgaactttgtgcctgtcctagaagtgaaaattgttcagtcca

SEQ ID NO: 53 - DNA, 156 bp, Homo sapiens
ctgagtaaatgggactgctgtcgttggatggcactgcgcagctcaggggtgggctctgggaggcggaggcggaggaggccgctggagatggtgctgaggacgaggaggccggtgggttggtcatgctcactaggccactgaccaagctgaagaggg

SEQ ID NO: 54 - DNA, 246 bp, Homo sapiens
tccaacaacagtgctgactgtccggataagagctggcaagtgcccttaggatgccgcatgggaaaaatcggttatcataatttcaaagtataaatatatttattatgtagcgctgcggttaagaaggaagagtgaggggtctgtccatggggtggcagtgatttcccacccgcctttcttgaatggcttcgtgttattcagccgtgccctggcaggaatggaactccatcagggaacagggcagct

SEQ ID NO: 55 - DNA, 181 bp, Homo sapiens
tggtgacagagtttgggaccgaggtggagcccgagtttgggaccaaggtggagcccgagtttgagacccagttggagcctgagtttgagacccagctggaacccgagtttgaggaagaggaggaggaggagaaagaggaggagatagccactggccaggcattccccttcacaacagtaga

SEQ ID NO: 56 - DNA, 211 bp, Homo sapiens; identical to SEQ ID NO: 40

SEQ ID NO: 57 - DNA, 275 bp, Homo sapiens
gttatggtgctaatgtactttcacttttaaactctagatcagaattgttgacttgcattcagaacataaatgcacaaaatctgtacatgtctcccatcagaaagattcattggcatgccacaggggattttcctccttcatcctgtaaaggtcaacaataaaaaccaaattatggggctgcttttgtcacactagcatagagaatgtgttgaaatttaactttgtaagcttgtatgtggttgttgatcttttttttccttacagacacccataat

SEQ ID NO: 58 - DNA, 177 bp, Homo sapiens
gataacagtcttgcatgtttatcatgttacaatttaatattccatcctgcccaacccttcctttcccatcctcaaaaaagggccattttatgatgcattgcacaccctctggggaaattgatctttaaattttgagacagtataaggaaaatctggttggtgtcttacaagtgagct

SEQ ID NO: 59 - DNA, 257 bp, Homo sapiens
ttgttactgctgattcttgtaaatctttttgcttctactttcatcttaaactaatacgtgccagatataactgtcttgtttcagtgagagacgccctatttctatgtcatttttaatgtatctatttgtacaattttaaagttcttattttagtatacgtataaatatcagtattctgacatgtaagaaaatgttacggcatcacacttatattttatgaacattgtactgttgctttaatatgagcttcaatataa

SEQ ID NO: 60 - DNA, 287 bp, Homo sapiens
agtgagactgactgcaagccccaccctccttgagactggagctggcgtctgcatacgagagacttggttgaacttggttggtccttgtctgcaccctcgacaagaccacactttgggacttgggagctggggctgaagttgctctgtacccatgaactcccagtttgcgaattatagagacaatctattttgttacttgcacttgttattcgaaccactgagagcgagatgggaagcatagatatctatatttttatttttactatgagggccttgtaataaatttc

SEQ ID NO: 61 - DNA, 113 bp, Homo sapiens
caaagtgctaataattaactcaaccaggtctactttttaatggctttcataacactaactcataaggttaccgatcaatgcatttcatacggatatagacctagggctctgga

SEQ ID NO: 62 - DNA, 37 bp, Homo sapiens
tgggctggagccgcacacgctctcctcccatgttaaa

SEQ ID NO: 63 - DNA, 245 bp, Homo sapiens
attgtgctataatccctatttagttcaaaattaaccagaatttttccatgtgaaatggaccaaactcatattattgttatgtaaatacagagttttaatgcagtatgacatcccacaggggaaaagaatgtctgtagtgggtgactgttatcaaatattttatagaatacaatgaacggtgaacagactggtaacttgtttgagttcccatgacagatttgagacttgtcaatagcaaatcattt

SEQ ID NO: 64 - DNA, 222 bp, Homo sapiens
atgattatagaaggctgtcttagtgcaaaaaacatacttacatttcagacatatccaaagggaatactcacattttgttaagaagttgaactatgactggagtaaaccatgtattcccttatcttttactttttttctgtgacatttatgtctcatgtaatttgcattactctggtggattgttctagtactgtattgggcttcttcgttaatagattattt

SEQ ID NO: 65 - DNA, 260 bp, Homo sapiens
gagtaggttcggtctgaaaggtgtggcctttatatttgatccacacacgttggtcttttaaccgtgctgagcagaaaacaaaacaggttaagaagagccgggtggcagctgacagaggaagccgctcaaataccttcacaataaatagtggcaatatatatatagtttaagaaggctctccatttggcatcgtttaatttatatgttatgttctaagcacagctctcttctcctattttcatcctgcaagcaactcaaaa

SEQ ID NO: 66 - DNA, 270 bp, Homo sapiens
gaaagagcatcgttccaatgcttgttcactgttcctctgtcatactgtatctggaatgctttgtaatacttgcatgcttcttagaccagaacatgtaggtccccttgtgtctcaatactttttttttcttaattgcatttgttggctctattttaatttttttcttttaaaataaacagctgggaccatcccaaaagacaagccatgcatacaactttggtcatgtatctctgcaaagcatcaaattaaatgcacgcttttgtcatgtca

SEQ ID NO: 67 - DNA, 220 bp, Homo sapiens
ctgtatcactgccttcgtttatatttttttaactgtgataatccccacaggcacattaactgttgcacttttgaatgtccaaaatttatattttagaaataataaaaagaaagatacttacatgttcccaaaacaatggtgtggtgaatgtgtgagaaaaactaacttgatagggtctaccaatacaaaatgtattacgaatgcccctgttcatgttttt

SEQ ID NO: 68 - DNA, 172 bp, Homo sapiens
aactgtgaccgtttctgtgtgaagatttttagctgtatttgtggtctctgtatttatatttatgtttagcaccgtcagtgttcctatccaatttcaaaaaaggaaaaaaaagagggaaaattacaaaaagagagaaaaaaagtgaatgacgtttgtttagccagtaggagaa

SEQ ID NO: 69 - DNA, 180 bp, Homo sapiens
acagtgattccccacgtgtgttcatctgcacccaccgagccaggcagaggccagccctccgtggtgcacacagcacgcgcctcagtccatcccattttagtctttaaaccctcaggaagtcacagtctccggacaccacaccacatgagcccaacaggtccacgatggatccaccagtcc

SEQ ID NO: 70 - DNA, 162 bp, Homo sapiens
gcattctcaagaggtcgtgccaatcagccactgaaaggaaaggcatcactatggactttctctattttaaaatggtaacaatcagaggaactataagaacacctttagaaataaaaatactgggatcaaactggcctgcaaaaccatagtcagttaattctt

SEQ ID NO: 71 - DNA, 269 bp, Homo sapiens
atttgcattttaccatgggtcctcaataaataaatagaatgttgttttttgtattttaagtttttttttgtttttcccctcagaggaaggatgaaaaaaagaattaactgactatggttttgcaggccagtttgatcccagtatttttatttctaaaggggttcttatagttcctctgattgttaccattttaaaatagagaaagtccatagtgatgcctttcctttcagtggctgattggcacgacctcttgagaatgcatgcatgaa

SEQ ID NO: 72 - DNA, 193 bp, Homo sapiens
  misc_feature (120)..(125): n is a, c, g, or t
  misc_feature (127)..(127): n is a, c, g, or t
gaagaaagctaactcagtacactaagagtgatttacatgcctgcaaataatttgtgtctggggtcttgaccctccccaaatgccttgttatttatatctctgcttttagataacagatgnnnnnntntctatgggcttgtaccggcagaggcaacagcaggtccttaagactccccaggtgccatgatgaaaa

SEQ ID NO: 73 - DNA, 65 bp, Homo sapiens
ttaacagtacatttgtgtggctctcaaacatccctttggaagggattgtgtgtactatgtaatat

SEQ ID NO: 74 - DNA, 87 bp, Homo sapiens
aaatgactttcaactaaccttgtgaatcttttgcagtgtactgtgtgcaataccaagggcatagctccctgtaatttgggaaataca

SEQ ID NO: 75 - DNA, 245 bp, Homo sapiens
gaaatacgaatgtagagatccctaatcatcaaattgttgattgaaagactgatcataaaccaatgctggtattgcaccttctggaactatgggcttgagaaaacccccaggatcacttctccttggcttccttcttttctgtgcttgcatcagtgtggactcctagaacgtgcgacctgcctcaagaaaatgcagttttcaaaaacagactcagcattcagcctccaatgaataagacatcttcc

SEQ ID NO: 76 - DNA, 41 bp, Homo sapiens
tcctcatggtggcagcgctcatagcgaaagcctactgtaat

SEQ ID NO: 77 - DNA, 221 bp, Homo sapiens
cctgtaagacaataggccatgttaattaaactgaagaaggatatatttggctgggtgttttcaaatgtcagcttaaaattggtaattgaatggaagcaaaattataagaagaggaaattaaagtcttccattgcatgtattgtaaacagaaggagatgggtgattccttcaattcaaaagctctctttggaatgaacaatgtgggcgtttgtaaattctgg

SEQ ID NO: 78 - DNA, 217 bp, Homo sapiens
gaccccagtggaaaacaaagccaaacaaaactgaaccacaaaaaaaaggctggtgttcaccaaaaccaaacttgttcatttagataatttgaaaaagttccatagaaaaggcgtgcagtactaagggaacaatccatgtgattaatgttttcattatgttcatgtaagaagccccttatttttagccataattttgcatactgaaaatccaataatc

SEQ ID NO: 79 - DNA, 163 bp, Homo sapiens
agaattaactgactatggttttgcaggccagtttgatcccagtatttttatttctaaaggggttcttatagttcctctgattgttaccattttaaaatagagaaagtccatagtgatgcctttcctttcagtggctgattggcacgacctcttgagaatgcat

SEQ ID NO: 80 - DNA, 139 bp, Homo sapiens
cccctccaagaccctgtgttcatttggtgttcctggaagcaggtgctacaacatgtgaggcattcggggaagctgcacatgtgccacacagtgacttggccccagacgcatagactgaggtataaagacaagtatgaat

SEQ ID NO: 81 - DNA, 272 bp, Homo sapiens
tttcactcttgctgtctgctcctctcacatcatccttgcctctgtctgtttaatcctcctgtccttcattttccttttttgcctctgcattcagcatttctacttccaatctccctcctctgctctttcttatttcctctgatctgcagacttgcttctgtcccctccttctgttcccctcctggatgtgtctttggccaacctttccttctctgagacttcgtgttcttgttggtagatgggggctgatacttctgggtcttgggcatgtc

SEQ ID NO: 82 - DNA, 258 bp, Homo sapiens
  misc_feature (61)..(61): n is a, c, g, or t
atggagtataagctgtttgtagtcaggcctggagtaatgagggtacctaaatactgaaggnatttttatgcagattgactgaaacctgaatcaaattggaaggagagggctgaattttgatagactggaagtattagagaattttctatactttgactcaaggaatggtcaacttttaggaaaagcaactatattatgtctgttaagatcatagaatcttaacctgaaagggaccttggagactatttagtacaactc

SEQ ID NO: 83 - DNA, 258 bp, Homo sapiens
atgaaaggtggaagttctacctagatttgaatgagtgtttttttaagggaatgagaatgtcatggtgctaaacctgacaaataagagatcattgaaatgctgaaaattttaacagtttttttaaaagtattgagggggcaaaaattaccaattatggtatacaaaaataagcctataaatgtgtttcacattgctaacttgagtttcagttgattcagtttgtaataactagtaatgagcttctgtttacaataaaaa

SEQ ID NO: 84 - DNA, 176 bp, Homo sapiens
tcctgcaggcatccgtgggggaaaaaaaatctctcagaaccctcaactattctgttccacacccaatgctgctccaccctcccccagacacagcccaagtccctccgcggctggagcgaagccttctgcagcaggaactctggacccctgggcctcatcacagcaatatttaacaa

SEQ ID NO: 85 - DNA, 156 bp, Homo sapiens
aactgatgggaaaggaccaattatttatagtttcccaacaaaagttttaagattttttacctttgcatcagtgcatttttatttatatcaaaaggtgctaaaatgattcaatttgcattttttgatcctgtagtgcctctatagaagtacccacag

SEQ ID NO: 86 - DNA, 137 bp, Homo sapiens
gtgggcagcacttagattcggagccatggatagtccggagtccaaggtctctgggtgagcagacagtcggccaaaggccagcctggagtcaaagagaccagacccctgcttagattgccatactcgcaccattccaa

SEQ ID NO: 87 - DNA, 233 bp, Homo sapiens
gaaacacaagagacttaaaggacaggaggaggagatggccataggagaggagggttcctcttaggtcagatggaggttctcagagccaagtcctccctctctactggagtggaaggtctattggccaacaatcctttctgcccacttccccttccccaattactattccctttgacttcagctgcctgaaacagccatgtccaagttcttcacctctatccaaagaacttgat

SEQ ID NO: 88 - DNA, 145 bp, Homo sapiens
gataccgactgaccgtgggccttacccgaagaggacagcccatgcagtacaatgtgggtccctctgtcttcaagtacccactgaggaatctgcagcctgcatctgagtacaccgtattcctcgtggccataaagggcaaccaaga

SEQ ID NO: 89 - DNA, 121 bp, Homo sapiens
ttatatttatgtttagcaccgtcagtgttcctatccaatttcaaaaaaggaaaaaaaagagggaaaattacaaaaagagagaaaaaaagtgaatgacgtttgtttagccagtaggagaaaa

SEQ ID NO: 90 - DNA, 269 bp, Homo sapiens
gcctggcctgattcagggccttgtggcccccagcttctgtttcaagctgggcagaccccaggatcccttccctccctaaggactcagctgaggggcccctctgcccccttctacctccacctcagcaccctcccccagcttgatgtttgggtctccccagcaccctcctccctggccggtgcaaagtacagggaggtaaagcaggacccttgcagacatgttgcccagcacacagtaggccctcaataaaagccatttgcactttaaat

SEQ ID NO: 91 - DNA, 205 bp, Homo sapiens
aatcccaattttcaggagtggtggtgtcaataaacgctctgtggccagtgtaaaagaaaatccctcgcagttgtggacatttctgttcctgtccagataccatttttcctagtatttctttgttatgtcccagaactgatgttttttttttaaggtactgaaaagaaatgaagttgatgtatgtcccaagttttgatgaaactgt

SEQ ID NO: 92 - DNA, 223 bp, Homo sapiens
tcatgttaaagagccgtgtctcccgccagcactcctcaccccggtatgaatgtgtttcctccacattgtatatccttccaccctctggctgcctagatcagtaaataaaattgatgtaatataatttataagtaacactgttgaaaccctgatcccagtggaggctgtaacccacctgcccccgcaccacccccctgacccctgttaccgcatttgtgtgtat

SEQ ID NO: 93 - DNA, 213 bp, Homo sapiens
tgtgttggggtagactgctcctgcagagtttggaagaagtcaccagcaaagccggcctaaccaagaaaagtcaaggcccttcatgaccttgctgggcacagaaaacaccctcgtggagtacactaatttgaactggactggtctcagtgtgagcacttggcacactttactaaacacatatacaaccccaccgtgagtcaactttaaagtaaa

SEQ ID NO: 94 - DNA, 115 bp, Homo sapiens
tgaacaaatggcctttattaaaaactgagtgactctatatagctgatcagttttttcacctggaagcatttgtttttactttgatatgactgtttttcggacagtttatttgttg

SEQ ID NO: 95 - DNA, 235 bp, Homo sapiens
gcagcttcctgataaagcgtgctgtgctgtgcagtaggaacacatcctatttattgtgatgttgtggttttattattttaaactttgttccatacacttgtataaatacatggatatttttatgtacagaagtatgttttttaaccagttcacttattgtactttggcaatttaaaagaaaatcagtaaaatattttgcttgtaaaatgcttaatatcgtgcctaggttatgtgg

SEQ ID NO: 96 - DNA, 243 bp, Homo sapiens
ggattttttcccctgtagtagtgaggtaacatgcttgaatgtcactgtgatatttatttcctctttgttcagttgtttttgaattcctgttaagtacatgttttaatactttgagcgatttaagatacttttctttttgcccatcattttccccaaggaatgtaattcacataaatccaaagctcatttttttttttattgtacacaagtagtataatgtttgcttttcccaataaacctcaa

SEQ ID NO: 97 - DNA, 163 bp, Homo sapiens
ctttcattggaagttcatcactgttaggcgttatcttgagtattataacaaagcaaatccacaagtattcaatataagattaggaaaaaaattcctgcgatactttgttgtcaaacacttgccactgatagacgttattttagcttttaaggcctgtcacatt

SEQ ID NO: 98 - DNA, 135 bp, Homo sapiens
gatatcagatcagttgagactaacagttgaaagcagtaaacatattacggacatattattgataaaagacatttatgaagaggataaactgtgaaggtgtacagacactaaaccatagttgctaaacacatacaa

SEQ ID NO: 99 - DNA, 233 bp, Homo sapiens
  misc_feature (35)..(35): n is a, c, g, or t
  misc_feature (53)..(53): n is a, c, g, or t
  misc_feature (60)..(60): n is a, c, g, or t
tggagtaacacccagatctctgcagcagttaagcntgggggcctagaactagnctagagntagaagaagggacaaatgcaatccgacctttggatctacacattcctcttgcttcaatgggtgtcatttaagaattagaggaaaatattaggagatggagaactagagttgaggaaaccaaaagaagaggagtcacagaaaaccagctctctctgtgcaaggcatcttgaaag

SEQ ID NO: 100 - DNA, 151 bp, Homo sapiens
gcagaaatatgtaaccttagactcagccagtttcctctgcagctgctaaaactacatgtggccagctccattcttccacactgcgtactacatttcctgcctttttctttcagtgtttttctaagactaaataaatagcaaactttcacct

SEQ ID NO: 101 - DNA, 243 bp, Homo sapiens
gagtaaaaagaaccctttgctgagtaaccaagcctttaattttgtgtttttatgaaaggaattaaaatacccacgataaatatttaccacaacctgtgtcagataaatgggaaattaaacacagattgtacaatgtgagcttgggagttaatggcccagattttactgttaggcagtaagagttggagtaggtagtcttgttatcatgagaagaaccttgaacagatacaactaatttacata

SEQ ID NO: 102 - DNA, 248 bp, Homo sapiens
atgccctgaggccagttggcgaggggtggctcctgagggtttttataccctttgtttgctaatgtttaattttgcatcataatttctacattgtccctgagtgtcagaactataatttattccatttctctctgtgtctgtgccaagaaacgcaggctctgggcctgccccttgcccaggaggccttgccagcctgtgtgcttgtgggaacaccttgtacctgagcttacaggtaccaataaagaggc

SEQ ID NO: 103 - DNA, 183 bp, Homo sapiens
tcacctgaggcgttcaaaagatataaccaaataaacaagtcatccacaatcaaaatacaacattcaatacttccaggtgtgtcagacttgggatgggacgctgatataatagggtagaaagaagtaacacgaagaagtggtggaaatgtaaaatccaagtcatatggcagtgatcaattatta

SEQ ID NO: 104 - DNA, 112 bp, Homo sapiens
attttagtatggtgtctgtttatgtaactctgacttgctggaaaagttgaaactccaaataatctgaaactagaaaagaaatagcacataattactaccttccccttggcgg

SEQ ID NO: 105 - DNA, 262 bp, Homo sapiens
tttcactcttgctgtctgctcctctcacatcatccttgcctctgtctgtttaatcctcctgtccttcattttccttttttgcctctgcattcagcatttctacttccaatctccctcctctgctctttcttatttcctctgatctgcagacttgcttctgtcccctccttctgttcccctcctggatgtgtctttggccaacctttccttctctgagacttcgtgttcttgttggtagatgggggctgatacttctgggtct

SEQ ID NO: 106 - DNA, 137 bp, Homo sapiens
ggattttttcccctgtagtagtgaggtaacatgcttgaatgtcactgtgatatttatttcctctttgttcagttgtttttgaattcctgttaagtacatgttttaatactttgagcgatttaagatacttttctttt

SEQ ID NO: 107 - DNA, 208 bp, Homo sapiens
ctctgagttttatatgctggaatccaatgcagagttggtttgggactgtgatcaagacaccttttattaataaagaagagacacaggtgtagatatgtatatacaaaaagatgtacggtctggccaaaccaccttcccagcctttatgcaaaaaaaggggagaatcaaagctttcatttcagaaatgttgcgtggaaaagtatctgta

SEQ ID NO: 108 - DNA, 122 bp, Homo sapiens
aggtggtgttggcagaggctatcgggctggacaaggacaaacccaaccgtgtgaccaaagtggctgtgaagatgttgaagtcggacgcaacagagaaagacttgtcagacctgatctcagaa

SEQ ID NO: 109 - DNA, 262 bp, Homo sapiens
ccaggttaggaaaggattcagcactacagcatacccctctacaacatacagccctgtcacattgagatcataatccctcctgtcccactcctctctaccaaccccaccctactagctaggtcttcagtgttttacattgaatattggtacattttaattattttttctcataaatgggttatttatagaaattttgttaactcttgagccatatgcatgtgtagatactggcagggctatgtttgtttatgatgctctgcaa

SEQ ID NO: 110 - DNA, 174 bp, Homo sapiens
gtttgaggtatttaactgacacctaagtggatctgttgaggaaacagttggatatacaaatttagtgtttaaggcagacttccaggcttgaaggaaaaatttggaagtcatcacgacatatatgtggtatttaaaattgtgaggttcaaggaccaagccccataccatttagag

SEQ ID NO: 111 - DNA, 80 bp, Homo sapiens
agagccaggacagtgaggtcaactttgacaattccatccacccagaagtcttggagctgctgcttgactatgcgtactcc

SEQ ID NO: 112 - DNA, 235 bp, Homo sapiens
ttctacactagtgccatgggaaccaggtctgaaaaagtagagagaagtgaaagtagagtctgggaagtagctgcctataactgagactagacggaaaaggaatactcgtgtattttaagatatgaatgtgactcaagactcgaggccgatacgaggctgtgattctgcctttggatggatgttgctgtacacagatgctacagacttgtactaacacaccgtaatttggcatttg

SEQ ID NO: 113 - DNA, 129 bp, Homo sapiens
aatgcatatggaggtaggctgaaaagaatgtaatttttattttctgaaatacagatttgagctatcagaccaacaaaccttccccctgaaaagtgagcagcaacgtaaaaacgtatgtgaagcctctct

SEQ ID NO: 114 - DNA, 120 bp, Homo sapiens
tacaatgatggttgagtgaaaatacagaaggggggtttgagtattcagatttcataaaacacttccttggaatatagctgcattaacttggaaagaagcctgttgggccagaagacagaa

SEQ ID NO: 115 - DNA, 156 bp, Homo sapiens
aatatacctgatgcgctgtagaatgaaaatgtaaaagataacctgtatgtgttccgagctttaattttttgtttacaaattgaacagtgttacatgggctgtccagtcctgattatagagaggaagaaatggtaacagtatggcagataagaatta

SEQ ID NO: 116 - DNA, 275 bp, Homo sapiens
  misc_feature (195)..(195): n is a, c, g, or t
ccacagtgttcccactaatgctattttttaattttttaatttagtttgtcataatttggtttcatcaactcctttgttttttccttctttttttttttttgagatgaggtctcactatcttgcccagactggtttcgaattgccctccagcaattctcccacctcagccttcagagtagctggcattgtgggtangcaccactgtgcccagctcctgttttataataaataagccagagctctatctccaaatggtgcaaatcatcaatgctatt

SEQ ID NO: 117 - DNA, 113 bp, Homo sapiens
gaaaactgttagatgcacactgttgattttcatggtggattcaagaactccctagtgaggagctgaacttgctcaatctaaggctgattgtcgtgttcctctttaaattgttt

SEQ ID NO: 118 - DNA, 223 bp, Homo sapiens
ccatgtcagcctggatagaggtatatgacgtgtgccaagaatttatcccagactcccctgtgtgacagcttcataataaagttacttaactgtgcctcttcctccttcctctccccacacaggatggatgggcatctttctccttgaccaccctactctcccttcctcccctgatcacctcccctccctgctctcccctggtgatggacttctaacatgagat

SEQ ID NO: 119 - DNA, 56 bp, Homo sapiens
cacaatctgagcacgctaccaaatctcaaaatatcctaagactaacaaaggcagct

SEQ ID NO: 120 - DNA, 221 bp, Homo sapiens
taatgtcatcctgtactcggcacaaatcaaaggccaatacaagtctgaaaagcagaaataaatatttttccaggtttttgctcgggcacatactaactgctttgggcattttaatctggtctccaaacaccaaagacccatttcgagcctgctattagcctgctgctgactctatcacttggagcaataatgtggggttatggtggtggaatcttgtatat

SEQ ID NO: 121 - DNA, 155 bp, Homo sapiens
aaacattaccgggcatggtagcttgcacctgcagtcccagctacttgggagactgaggtgagaggatcacctgagtgtaggaggtgaaagcctcaccgaactatgactgaaccactgcactccagcgtgggcacttggcaccagagcaagattct

SEQ ID NO: 122 - DNA, 62 bp, Homo sapiens
tatgtaattataagatgaagcgtagtgaattgtacagctgttgtaataatgacctatttcta

SEQ ID NO: 123 - DNA, 258 bp, Homo sapiens
cattctttcctccacaggattgctttgtccatctcctgctttcatttcaagtgcataaacaaaacctcaaagggcctgggaaggtgaggcaggccagagtctgtgttctgtgttgagtgtcaagctatttgttaagaaggtttgcaacaggcctttggtgtgggctttgccagagactgttttgaacactttgcttgagatccgtgccctgtaaaatggatatgatgttttactgatgtctgtaatacatttgtaaac

SEQ ID NO: 124 - DNA, 297 bp, Homo sapiens
atggtaatgtaggatcctttcacagagtgccaggctaaagagctgaactttgtggtggaagagacagaccccctatgtgctctgtagacacctgtgatgaagtagaactcatgaggatatgaagagaaacatttgtaatttgagtgattaaactaggaacgaaagaggaggggagaaataggaagagagaatcaccggccctgttgactgatttgagctgggaatgaagaagaaaaccctgcaggtgtgggcaccaatgtttgaaacccccacagtgtgagtctcaactctgtgtga

SEQ ID NO: 125 - DNA, 199 bp, Homo sapiens
gggagtcaatgaatagtacctaaaatggaaaccaaacaaaacaacttcaggaagtaacaagggcttgcttagagacatgacggtaaaccctgaaccatcagctaaaagaggtagatagcagtggttgcccctggggagaggtaaatgtgatggagagggaacaactgtgtacaaacatgtgactttacgttttgatcaa

SEQ ID NO: 126 - DNA, 72 bp, Homo sapiens
acatgagtatggaatggtgttttattatgactttagtttgcattttcctcaattctcgttaaatccttcatt

SEQ ID NO: 127 - DNA, 197 bp, Homo sapiens
atgtcaagaaaatgacggtcacagaccaggtgaactgccccaagctctcgtaaccaggttctacagggaggctgcacccactccatgttacttctgcttcgctttcccctaccccaccccccccccataaagacaaaccaatcaaccacgacaaaggaagttgacctgaacatgtaaccatgccctaccctgttacc

SEQ ID NO: 128 - DNA, 179 bp, Homo sapiens
agaggttataggtcactcctggggcctcttgggtcccccacgtgacagtgcctgggaatgtattattctgcagcatgacctgtgaccagcactgtctcagtttcactttcacatagatgtccctttcttggccagttatcccttccttttagcctagttcatccaatcctcactgggtg

SEQ ID NO: 129 - DNA, 238 bp, Homo sapiens
actggtatattattgcttcatgttttgtaccatcataagattttgtgcagattttttttacagaaattattattttttatgacaatatgacacttgtaaattgttgtttcaaaatgaacagcgaagccttaactttaaatgacatttgtattttcagacactgagtagcataaaaaccacatagaactgaactgtaacttaaattccaaactatgactactacattccaaagaaacag

SEQ ID NO: 130 - DNA, 87 bp, Homo sapiens
gccctgcgccggcaaccacctagtggcccagggaaggccgataatttaaacagtctcccaccacctaccccaagagatactggttgt

SEQ ID NO: 131 - DNA, 119 bp, Homo sapiens
actttaataaaggttatccataccaataaaaagtgtacaacacagcattttctgttaaattattattggttttcagttgtaatttggtattttttctggcatgcgtttattaatttatt

SEQ ID NO: 132 - DNA, 47 bp, Homo sapiens
aggataaacttgtgtggtgtagagaagttaaaatcctcacgttgtac

SEQ ID NO: 133 - DNA, 286 bp, Homo sapiens
aactgggggctctgtgggggctctgtatatagctatgaagaaaacacaaagtgtataaatctgagtatatatttacatgtctttttaaaagggtcgttaccagagatttacccatcgggtaagatgctcctggtggctgggaggcatcagttgctatatattaaaaacaaaaaagaaaaaaaaggaaaatgtttttaaaaaggtcatatattttttgctacttttgctgttttatttttttaaattatgttctaaacctattttcagtttaggtccctcaataaaa

SEQ ID NO: 134 - DNA, 161 bp, Homo sapiens
attagtgaacttatctttgcagctgagtacttaaattctttttaaaaagataccctttggattgatcacattgtttgacccagtatgttttgtagacacgttagttataatcaccttgtatctctaaatatggtgtgatatgaaccagtccattcacattg

SEQ ID NO: 135 - DNA, 199 bp, Homo sapiens
  misc_feature (113)..(113): n is a, c, g, or t
  misc_feature (115)..(115): n is a, c, g, or t
  misc_feature (122)..(122): n is a, c, g, or t
aagggagccgggaggatgggctgcagctgtggaggagggtttcagaggagagaggtcggagagcagaggcctgagaagccagaggcaggtggagagagggtggaaagtgagcntnagcgggncttgggctggagccgcacacgctctcctcccatgttaaatagcacctttagaaaaattcacaagtccccatccacat

SEQ ID NO: 136 - DNA, 265 bp, Homo sapiens
tgttttagaaccagccgtattttacatgaagctgtataattaattgtcattatttttgttagcaaagattaaatgtgtcattggaagccatccctttttttacatttcatacaacagaaaccagaaaagcaatactgtttccattttaaggatatgattaatattattaatataataatgatgatgatgatgatgaaaactaaggatttttcaagagatctttctttccaaaacatttttggacagtacctgattgtattttttt

SEQ ID NO: 137 - DNA, 74 bp, Homo sapiens
cgatatgacttccatgtaaacgttcatccactctgcctgcttacaccctgccctcatgctaatgtaataaactc

SEQ ID NO: 138 - DNA, 172 bp, Homo sapiens
tgcagtgctagtcccggcatcctgatggctccgacaggcctgctccagagcacggctgaccatttttgctccgggatctcagctcccgttccccaagcacactcctagctgctccagtctcagcctgggcagcttccccctgccttttgcacgtttgcatccccagcatttc

SEQ ID NO: 139 - DNA, 195 bp, Homo sapiens
tatgagttattcaaggaggagactttttaaagacagcaacgcaattcttgtaacttgtgtaaatagccccatctttcagagtgataccatttctacatttgataatgcctgtattcctgtaggatgtatatagtttaggggattttttttttgtttggttttgttttttagaagtcaatatgtctggttttattt

SEQ ID NO: 140 - DNA, 138 bp, Homo sapiens
ttcccaagcccatgagtccttgaaaatattttttatatatacagtaactttatgtgtaaatacataagcggcgtaagtttaaaggatgttggtgttccacgtgttttattcctgtatgttgtccaattgttgacagtt

SEQ ID NO: 141 - DNA, 216 bp, Homo sapiens
gcaatatatttgtgattccccatgtaattcttcaatgttaaacagtgcagtcctctttcgaaagctaagatgaccatgcgccctttcctctgtacatatacccttaagaacgccccctccacacactgccccccagtatatgccgcattgtactgctgtgttatatgctatgtacatgtcagaaaccattagcattgcatgcaggtttcatattct

SEQ ID NO: 142 - DNA, 94 bp, Homo sapiens
gcctcccattcaagtgaagttataatttacactgagggtttcaaaattcgactagaagtggagatatattatttatttatgcactgtactgtat

SEQ ID NO: 143 - DNA, 147 bp, Homo sapiens
tatatacatggtgctcaatagcaacatcttagcagatgaagcagtttatgattccactccctcctgtatgacaggtagccactatactgaatcaaggtgctgaactcaaatcacaaaattctggcttaccgatacaacaaccaatac

SEQ ID NO: 144 - DNA, 251 bp, Homo sapiens
atataattggacaaacgctggcaaaaagaaaaaaatggtaagcaaaaaacccaagataaagtttcgaggacatcaggccttttgaaatacaatgtcaaatgacacattgtacggtttcaaaaaatccgctagacatgtcataagttttaactgtaatgcccaggaaaggatatcttaaaatattctaaacttgtgtaacaaaggaataattaactgtaatagtttttcaataaatcgagttgggtgtttcc

SEQ ID NO: 145 - DNA, 52 bp, Homo sapiens
agtgcaacgtattcaagtcctcaatatcctgatcataataccatgctatagg

SEQ ID NO: 146 - DNA, 247 bp, Homo sapiens
ggcaggcttctctgtagaaccccaggggcttcggcccagaccacagcgtcttgccctgagcctagagcagggagtcccgaacttctgcattcacagaccacctccacaattgttataaccaaaggcctcctgttctgttatttcacttaaatcaacatgctattttgttttcactcacttctgactttagcctcgtgctgagccgtgtatccatgcagtcatgttcacgtgctagttacgtttttct

SEQ ID NO: 147 - DNA, 188 bp, Homo sapiens
tattcctggtagaggaatttctgtatttgaaaattctccagaaggaataatataaactgtggactttgggtgataatgatatgtaggttcgtcagttgttaacaaatgtatccctctgttgggggctattgataatggggaaggctgtgcatgtgtgggagtaggaggtgtatgggacatctctgtac

SEQ ID NO: 148 - DNA, 277 bp, Homo sapiens
tggaggattcaagatgagcaggtatgttttctgctttcaataactcattttctgctgcagagatagccttgtaagcaagcaaaggaaaactttgacatttctctgcaaagataatgcattacatataagggtgtgtctgggagggtaccaggtgcctgtcagcaaaagttgcaaaaacagcttgataagggtattaagtgggcctgttgggaaaggcaggagtgtcaaatgtcggacagaactccagacagagaaatccagatatccagtaggttag

SEQ ID NO: 149 - DNA, 178 bp, Homo sapiens
  misc_feature (84)..(84): n is a, c, g, or t
  misc_feature (89)..(89): n is a, c, g, or t
  misc_feature (123)..(123): n is a, c, g, or t
gagacaaggacagacaaattttctggctgtccccatttctcctgggggaggggtttggggctggtttgactttaattggtgggngggtngtttctgccgctctgtttgctgcagtccccgtgncctgcttggggactgagaaatttgagccaggtatccagagccacagcccatcttg

SEQ ID NO: 150 - DNA, 217 bp, Homo sapiens
gtgtgttaaaatgagggtctcactgctttaggattgaagtggctggaaagagtgatgcctggggaaggagatggagttatgagggtactgtggctggtactttctgtactaaacatttcctttttctattttaccactaattttgttttaaactgtgagccgtccaagtcagaagaagacagcaaaaaaagcaacttttccaacatacaatttactt

SEQ ID NO: 151 - DNA, 277 bp, Homo sapiens
tacccccttttatatctaatgtagaaaaagcgaaattgaatctggaaagcaaactgttgtatatagttgcggtaacaatcatgaagagagagccgggctgtcccctcagtaattcattttaaataacaaattatttaaaaataaaattcatgccagagccagctgaagaggccttccttcatcaccactgaggccacccccaatctgggccctctgtccatctggcatgtctcctcccagcaagattcatctgttcaatgccatttgcgtttcaata

SEQ ID NO: 152 - DNA, 162 bp, Homo sapiens
tgtttttgacatcagctgtaatcattcctgtgctgtgttttttattacccttggtaggtattagacttgcccttttttaaaaaaaggtttttgcatcgtggaagcatttgacccagagtggaacgcgtggcctatgcaggtggattccttcaggtctttcct

SEQ ID NO: 153 - DNA, 212 bp, Homo sapiens
cctgagtcctgggatcagacaccccttcacgtgtatccccacacaaatgcaagctcaccaaggtcccctttcagtccccttccctacaccctgaccggccactgccgcacacccacccagagcacgccacccgccatgggagtgtgctcaggagtcgcgggcagcgtggacatctgtcccagagggggcagaatctccaatagaggactgag

SEQ ID NO: 154 - DNA, 286 bp, Homo sapiens
acttcagggaagtttcataaaaggaagaattttaactcagcgtagaaagatgggtaaattttcctcatgtgaaggtgtactgcctggggtgctgcaggctggagatgagtattaaaataggaggagagtgagtgaaagcacaggaggaggaagggtcaggcaagtttggtgaacacagcaactggctatagaacaggagcagtgggagaaagtccagaaaggtctgctgagcttcagttgtacaaagctgtggagtttggcctttggtcatggctagattaggtct

SEQ ID NO: 155 - DNA, 274 bp, Homo sapiens
ggttgagtttgtccattgctagggagagacttccagtaataaaatttactattctagatgcttctactgttatgttttatctgcccatttatctttcttagttaccaggagaaatgtgtgacacctatattataatgaaaacaatcttattacttatagtttatctatattaaacaaatttaattgcattttaaagcattctttgatattgttgcttttgcaataaatatggataatcttggttataagggagttaaaacaatgctgtaataaa

SEQ ID NO: 156 - DNA, 187 bp, Homo sapiens
ttcagtttgtcctcatagggaatcaagtattttagctaggtgatgtcttgcaagtacgttccactttgttacaatctactatctgtatatactatttgtatcttaattcttttatgagatgttctgtaacatttttctcactttgacaaatgtttttagactgtacagtcaagatctggcgcttggg

SEQ ID NO: 157 - DNA, 268 bp, Homo sapiens
atgagtcaaaatccgctctccatgcttactcttgacaccccattgaagccactcattgtgtgtgcgtctgggtgtgaagtccagctccgtgtggtcctgtgcttgtactgccctgctttgcagttcctttgcacttactcatcgagtgctgttttgaaatgctgacattatataaacgtaaaagaaaatgtaaaaaaaaaaaacccacacacaaacaaacccatacgatctgtatttgtatatacacgtgtccgtacaagtataacta

SEQ ID NO: 158 - DNA, 124 bp, Homo sapiens
ggctcaggtcctccctacaagacctaccactcacccatgcctatgccactccatctggacatttaatgaaactgagagacagaggcttgtttgctttgccctcttttcctggtcacccccactc

SEQ ID NO: 159 - DNA, 261 bp, Homo sapiens
agccgctgccaagtctgtatgagaagaacataatgaagcctgactcagctaatgtcacaacatggtgctacttcttcttctttttgttaacagcaacgaaccctagaaatatatcctgtgtacctcactgtccaatatgaaaaccgtaaagtgccttataggaatttgcgtaactaacacaccctgcttcattgacctctacttgctgaaggagaaaaagacagcgataagctttcaatagtggcataccaaatggcactt

SEQ ID NO: 160 - DNA, 289 bp, Homo sapiens
tcccaagtagtgctgactgactctcctggtgacaggggtttgtgtccgagcccctgcggtcaaggagtgtggagcaaaacgtgggtactagggtgggaggcggggaaaggccacagcacactggcgctccagcaaagccaaatcatgtctcctctggccactgcggtcctctccttggtacatgtcatcccccagaggagtatccaaagctattccactatgcactcatcaaccctggcttgtcagccttggggaaggtcactttattcataaaaatgcctctttgagt

SEQ ID NO: 161 - DNA, 133 bp, Homo sapiens
gtatggatgggtatgttgagactcaattacttttttattagcttccccgtttggaagatcccaaacaccaaagatggaaggtgaaaataaagactgcgtgaccgggaagaaagtttgaattactaatagtggg

SEQ ID NO: 162 - DNA, 53 bp, Homo sapiens
aagcaagatatcaatgtagcagaattgcacttgtgcctcacgaacatacataa

SEQ ID NO: 163 - DNA, 89 bp, Homo sapiens
tgactgaattgctgacccttcaagctctgtccttatccattacctcaaagcagtcattccttagtaaagtttccaacaaatagaaatta

SEQ ID NO: 164 - DNA, 262 bp, Homo sapiens
gtcctctctatcctggatgagctcatgaacatttctcttgtgttcctgactccttcccaatgaacacctttctgccaccccaagctttgctctcctcctctgtgagctctgggcttcccagtttgtttacccgggaaagtacgtctagattgtgtggtttgcctcattgtgctatttgcccactttccttccctgaagaaatatctgtgaaccttctttctgttcagtcctaaaattcgaaataaagtgagactatggttca

SEQ ID NO: 165 - DNA, 201 bp, Homo sapiens
ccctgctgcctctgatcgtaggaattgaggagtgtcccgccttgtggctgagaactggacagtggcaggggctggagatgggtgtgtgtgtgtgtgtgtgtgtgtgtgtgtgtgtgcgcgcgcgccagtgcaagaccgagattgagggaaagcatgtctgctgggtgtgaccatgtttcctctcaataaagttcccctgtg

SEQ ID NO: 166 - DNA, 45 bp, Homo sapiens
tgcttatacacttacactttatgcacaaaatgtagggttataata

SEQ ID NO: 167 - DNA, 275 bp, Homo sapiens
acttacatactagcttccaaggacaggtggaggtagggccagcctggcgggagtggagaagcccagtctgtcctatgtaagggacaaagccaggtttaatggtactgggtagggggcactgccaagacaataagctaggctactgggtccagctactactttggtgggattcaggtgagtctccatgcacttcacatgttacccagtgttcttgttacttccaaggagaaccaagaatggctctgtcacactcgaagccaggtttgatcaataaa

SEQ ID NO: 168 - DNA, 135 bp, Homo sapiens
tacccgggaaagtacgtctagattgtgtggtttgcctcattgtgctatttgcccactttccttccctgaagaaatatctgtgaaccttctttctgttcagtcctaaaattcgaaataaagtgagactatggttca

SEQ ID NO: 169 - DNA, 182 bp, Homo sapiens
tgagtaggtgagtttattgggacttacacacaggtcaatcctgggcggcgacaagacagctctagagatctgagcttcctcccaatgctaaactgctttcatgctaattttctgactgtttacttaccgggtaagagcgatgggactgttttcattggttggttctcacatactctctggga

SEQ ID NO: 170 - DNA, 174 bp, Homo sapiens
ttgcatggagacttgaggagggagggcttgaggttggtgaggttaggtgcgtgtttcctgtgcaagtcaggacatcagtctgattaaaggtggtgccaatttatttacatttaaacttgtcagggtataaaatgacatcccattaattatattgttaatcaatcacgtgtatag

SEQ ID NO: 171 - DNA, 151 bp, Homo sapiens
acacagaagagtgacatgtttacaaacctcaagccagccttgctcctggctggggcctgttgaagatgcttgtattttacttttccattgtaattgctatcgccatcacagctgaacttgttgagatccccgtgttactgcctatcagcat

SEQ ID NO: 172 - DNA, 116 bp, Homo sapiens
tgctgtgaaagaggctggctacacaatcgaatggtttgaggtgatctcgcaaagttattcttccaccatggccaacaacgaaggacttttctccctggtggcgaggaagctgagca

SEQ ID NO: 173 - DNA, 123 bp, Homo sapiens
atggtataatggttgactgggtttctctgtatagtactggcatggtacggagatgtttcacgaagtttgttcatcagactcctgtgcaactttcccaatgtggcctaaaaatgcaacttcttt

SEQ ID NO: 174 - DNA, 278 bp, Homo sapiens
ggaagccattatcctaaatgaactcactcagaaacagaaaaccaaataccacatgttctcacttataagtagaagctaaacattgagtacacatggatacaaagaagggaaccgcagacactggggcctacctgaggtcggagcatggaaggagggtgaggatcaaaaaactacctatctggtactatgctttttatctggatgatgaaataatctgtacaacaaaccctggtgacatgcaatttacctatatagcaagcctacacatgtgcccctga

SEQ ID NO: 175 - DNA, 292 bp, Homo sapiens
acagtgttgtatgaggtttgaggattttgatccaagctggtcccactcagtccatagcagagaatgaaagggcccagagagggtggtgacctctgcctgaagtcacacagtgagtcgaggacagggaggtgaccccaggtttctatgtgtagggcgggaggatgttttgggacacagttcaattctcatttgtcacacactttggctattagagatcaaccccttcgctcctgtgtcttgcaatggcagccttggcaaacgctaaatgaaaatcgtgacaacacttgtgtta

SEQ ID NO: 176 - DNA, 132 bp, Homo sapiens
acagcccacccttgtgtccactgtgacccctgttcccatgctgacctgtgtttcctccccagtcatctttcttgttccagagaggtggggctggatgtctccatctctgtctcaactttacgtgcactgagc

SEQ ID NO: 177 - DNA, 232 bp, Homo sapiens
tgaaccaaaatagagtcagctgacccagcatcagccacactttgggttggaaaatgtttgcctgttggaattaatttaagcttaagtatatatcaacattattttattgtgcaattaaaacaatacaaattcatggttttttaaagttaaaaattttaaccactgtaacaacagtttttgtgttattttctgtattaaacatcttgttgcacgcatttgaggtcatcagggt

SEQ ID NO: 178 - DNA, 220 bp, Homo sapiens
gaacaggaacgccttctcaaggagggattcgagaatgagagcaagagacttcaaaaagacatatgggatatccagatgagaagcaaatcattggagccaatatgtaacatactttaaaagtccaaggagcaaaatttgcctgtccagctccctctccccaagaaacaacatgaatgagcaacttcagagtgtcaaacaactgccattaaacttaactcaa

SEQ ID NO: 179 - DNA, 278 bp, Homo sapiens
tgagaggcaagagttgttcctgcccttccctttgtgacttgaagaaccctgactttgtttctgcaaaggcacctgcatgtgtctgtgttcgtgtaggcataatgtgaggaggtggggagagcaccccacccccatgtccaccatgaccctcttcccacgctgacctgtgctccctctccaatcatctttcctgttccagagaggtggggctgaggtgtctccatctctgtctcaacttcatggtgcactgagctgtaacttcttccttccctattaaa

SEQ ID NO: 180 - DNA, 63 bp, Homo sapiens
attagaaccttagtataaatttactttctcaaattcttgccatgagaggttgatgagttaatt

SEQ ID NO: 181 - DNA, 37 bp, Homo sapiens
cagggactggctatcccaagacctggcagatgtggct

SEQ ID NO: 182 - DNA, 72 bp, Homo sapiens
gaatggcagtaccagaaggcattggttaagtgtcccaggaaccacacaagcagtgactcctaaagaagttca

SEQ ID NO: 183 - DNA, 243 bp, Homo sapiens
aaaacttggcactttttcgtgtggatcttgccacatttctgatcagaggtgtacactaacatttcccccgagctcttggcctttgcatttatttatacagtgccttgctcggcgcccaccaccccctcaagccccagcagccctcaacaggcccagggagggaagtgtgagcgccttggtatgacttaaaattggaaatgtcatctaaccattaagtcatgtgtgaacacataaggacgtgtg

SEQ ID NO: 184 - DNA, 296 bp, Homo sapiens
tgaggatgtcaccaattaaccagaaatccagttattttccgccctcaaaatgacagccatggccggccgggtgcttttgggggctcgtcggggggacagctccactttgactggcacagtctttgcatggagacttgaggagggagggcttgaggttggtgaggttaggtgcgtgtttcctgtgcaagtcaggacatcagtttgattaaaggtggtgccaatttatttacatttaaacttgtcagggtataaaatgacatcccattaattatattgttaatcaatcacgtgtatag

SEQ ID NO: 185 - DNA, 279 bp, Homo sapiens
gcatttgctgtgtttcgttagcatctggctccaggacagaccttcaacttccaaattggatactgctgccaagaagttgctctgaagtcagtttctatcattttgctctttgattcaaagcactgtttctctcactgggcctccaaccatgttcccttttttttagcaccacaaataatcaaaacccaacatgactgtttgttttcctttaaaaatatgcaccaaatcatctctcatcacttttctttgagggttttagtagacagtaggagttaataa

SEQ ID NO: 186 - DNA, 75 bp, Homo sapiens
agaacctgagtataaatttactttctcaaattcttgccatgagaggttgatgagttaattaaaggagaagattcc

SEQ ID NO: 187 - DNA, 132 bp, Homo sapiens
acagcccacccttgtgtccactgtgacccctgttcccatgctgacctgtgtttcctccccagtcatctttcttgttccagagaggtggggctggatgtctccatctctgtctcaactttatgtgcactgagc

SEQ ID NO: 188 - DNA, 264 bp, Homo sapiens
gccaacagcatcttttccgggttcctgctctttccagatatggaggcctgacctgtgggctgcttcacatccaccccggctccccctgccagcaacgctcactctacccccaacaccaccccttgcccagccaatgcacacagtagggcttggtgaatgctgctgagtgaatgagtaaataaacttttcaaggccaagggacagtggtttaattcaactctgtgtcccagcacctggcacaccagaagtgccatgctcagaaat

SEQ ID NO: 189 - DNA, 243 bp, Homo sapiens
tcccctgcttgaacactgaagggcaggtggtgggccatggccatggtccccagctgaggagcaggtgtccctgagaacccaaacttcccagagagtatgtgagaaccaaccaatgaaaacagtcccatcgctcttacccggtaagtaaacagtcagaaaattagcatgaaagcagtttagcattgggaggaagctcagatctctagagctgtcttgtcgccgcccaggattgacctgtgtgta

SEQ ID NO: 190 - DNA, 167 bp, Homo sapiens
tctgagcgggtcatggggcaacacggttagcggggagagcacggggtagccggagaagggcctctggagcaggtctggaggggccatggggcagtcctgggtgtggggacacagtcgggttgacccagggctgtctccctccagagcctccctccggacaatgagtc

SEQ ID NO: 191 - DNA, 241 bp, Homo sapiens
ttcccatctcgtccatgagcctaggtcttggagccttgtgttggaggctgctgtgatgtcaggaacggggatctttctagcttttggccacttcctgggacctcacgcccctgttgacagatggagattgggcagcagggccttgctgcattgttatctgctgttccgacttggtttgtcttgtccaagggtgacgaaagagccaggcaccagggtctcatgggatgaggtccaacttttt

SEQ ID NO: 192 - DNA, 217 bp, Homo sapiens
atgctgtggttggatcaaggactcattcctgccttggagaaaatacttcaaccagagcagggagcctgggggtgtcggggcaggaggctggggatgggggtgggatatgagggtggcatgcagctgagggcagggccagggctggtgtccctaaggttgtacagactcttgtgaatatttgtattttccagatggaataaaaaggcccgtgtaatta

SEQ ID NO: 193 - DNA, 82 bp, Homo sapiens
gtgctcagtagtcagactggatagtccgtttttgcttatccgttagccgtggggatttagcaggaagctgtgagagcagttt

SEQ ID NO: 194 - DNA, 37 bp, Homo sapiens
gatgcttaacaaaggttaccataagccacaaattcat

SEQ ID NO: 195 - DNA, 241 bp, Homo sapiens
aactggaccctgtcgttctccatcttctcagtcagttgtttcaagtgttcctgataactcctctccttctgttccatcatctgctcattctttctttgcatttcctgcaacatttttgctgaagcctgtgcagactcagctttcacaagttccacttcaatctccttttctttttctgtgagagtctggtctgtctggagaattgcatcagtcatagactccttggatttcaagtatgtct

SEQ ID NO: 196 - DNA, 173 bp, Homo sapiens
tattttccctctttcgaacaaagacattggtttgcccaaggactacaaataaaccaacgggaaaaaagaaaggttccagttttgtctgaaaattctgattaagcctctgggccctacagcctggagaacctggagaatcctacacccacagaacccggctttgtccccaaaga

SEQ ID NO: 197 - DNA, 296 bp, Homo sapiens
  misc_feature (75)..(75): n is a, c, g, or t
  misc_feature (262)..(262): n is a, c, g, or t
atgggtgtagatcaaggcaggagcaggaaccaaaaagaaaggcataaacataagaaaaaaaatggaaggggtggnaaacagagtacaataacatgagtaatttgatgggggctattatgaactgagaaatgaactttgaaaagtatcttggggccaaatcatgtagactcttgagtgatgtgttaaggaatgctatgagtgctgagagggcatcagaagtccttgagagcctccagagaaaggctcttaaaaatgcagcgcnatctccagtgacagaagatactgctagaaatctg

SEQ ID NO: 198 - DNA, 159 bp, Homo sapiens
gagcttccttcttcgttcttggcaccatcttatgaaaagggtccagattaagatttttgactgagtcattctaaagtaagttgcaagacccatgatactagaccactaaatacttcatcacacacctcctaagaataagaaccaacattatcacaccaa

SEQ ID NO: 199 - DNA, 228 bp, Homo sapiens
atgtaggagaacgtgccctattcacactttgggaagacgctaatttgtgacatttttttttcaagcctgccatcaaggacattttttaagacccaactggcatgagttggggtaatttcctattattttcattttggacaacttttttaacttatattctttatagaggattccccaaaatgtgctcctcatttttggcctctcatgttccaaacctcattgaataaa

SEQ ID NO: 200 - DNA, 239 bp, Homo sapiens
agatgcgctcgagacccacgggccttccacctccctcagcttcctgcatggacccaccttactggccagtctgcatccttgcctagaccattctcccctccagggagcccaccctgacccacccccactgcaccccctccccatgggttctctccttcctctgaacttctttaggagtcactgcttgtgtggttcctgggacacttaaccaatgccttctggtactgccattctttttt

SEQ ID NO: 201 - DNA, 114 bp, Homo sapiens
ctgcacagctcagcacaacattccaagctcaaaatagaagccttctcagtgagctccagcacgcccagaggactgttaataacgatgatccatgtgttttactctaaagtgcta

SEQ ID NO: 202 - DNA, 173 bp, Homo sapiens
gctgagtatgttaagctctttatgactgtttttgtagtggtatagagtactgcagaatacagtaagctgctttattgtagcatttcttgatgttgcttagtcacttatttcataaacaacttaatgttttgaataatttcttactaaacattttgttattgggcaagtgattg

SEQ ID NO: 203 - DNA, 196 bp, Homo sapiens
gcctttaagataccttgatgaagacctggactattgaatggagcagaaattcacctctctcactgactattacagttgcatttttatggagttcttcttctcctaggattcctaagactgctgctgaatttataaaaattaagtttgtgaatgtgactacttagtggtgtatatgagactttcaagggaattaaat

SEQ ID NO: 204 - DNA, 60 bp, Homo sapiens
tttctggggtctttgagctccaaaaaataaacacttcctttgagggagagccccccccca

SEQ ID NO: 205 - DNA, 83 bp, Homo sapiens
ttccaccatcaaatgctgtagaatgcttggcactccctaaccaaatgctgtctccataatgccactggtgttaagatatattt

SEQ ID NO: 206 - DNA, 115 bp, Homo sapiens
cagaaagccaagtggactcaacggagaggccagcaagtttcaggaaatggtgcatttggtgaacaaggagtcgtcagaaactccagaccagtttatgacagctgatgagacaagg

SEQ ID NO: 207 - DNA, 159 bp, Homo sapiens; identical to SEQ ID NO: 198

SEQ ID NO: 208 - DNA, 285 bp, Homo sapiens
caagacctaggctcatggacgagatgggaaggcacagggagaagggataaccctacacccagaccccaggctggacatgctgactgtcctctcccctccagcctttggccttggcttttctagcctatttacctgcaggctgagccactctcttccctttccccagcatcactccccaaggaagagccaatgttttccacccataatcctttctgccgacccctagttccctctgctcagccaagcttgttatcagctttcagggccatggttcacattagaata

SEQ ID NO: 209 - DNA, 96 bp, Homo sapiens
tcgacacagtgctttccgtggcactgcatacaatctgaggcctcctctctcagtttttatatagatggcgagaacctaagtttcagttgattttac

SEQ ID NO: 210 - DNA, 284 bp, Homo sapiens
aactgaaatgtcaacctgtggactgtggcattcctgaatccattgagaatggtaaagttgaagacccagagagcactttgtttggttctgtcatccgctacacttgtgaggagccatattactacatggaaaatggaggaggtggggagtatcactgtgctggtaacgggagctgggtgaatgaggtgctgggcccggagctgccgaaatgtgttccagtctgtggagtccccagagaaccctttgaagaaaaacagaggataattggaggatccgatgcagat

SEQ ID NO: 211 - DNA, 251 bp, Homo sapiens
gaacaggagcaactactaaaagagggatttcaaaaagaaagcagaataatgaaaaatgagatacaggatctccagacgaaaatgagacgacgaaaggcatgtaccataagctaaagaccagagccttcctgtcacccctaaccaaggcataattgaaacaattttagaatttggaacaagcgtcactacatttgataataattagatcttgcatcataacaccaaaagtttataaaggcatgtggtacaat

SEQ ID NO: 212 - DNA, 273 bp, Homo sapiens
tagaagatgacctcgttccggagctgggtatttcaaatttgctttcatccagccactgcccaaagccattttcctgcctactggatgcttacagtgactgtggatacgggggttccctttccccattcagtgacatgtcctctttgcttggtgtaaaccattcttgggaggacacttttgccaatgaactctttccccagctgattagtgtctaaggaatgatccaatactgttgcccttttccttgactattacactgcctggaggatagca

SEQ ID NO: 213 - DNA, 273 bp, Homo sapiens
ttcaaactcaatgatgctaccatgcctctccaacattttcaaccccctgacattatcttggatcctatggtttctccatccaattctttgaatttcccagtctcccctatgtaaaacttagcaacttgggggacctcattcctgggactatgctgtaaccaaattattgtccaaggctatatttttgggatgaatataatttgaggaagggagttaaagaccctcctggggctctcagtgtgccatagaggacagcaactggtgattgtttca

SEQ ID NO: 214 - DNA, 155 bp, Homo sapiens
gttgttgatcatggatcatactccccttgtttctttgggtgagaagggatcgcagtttggaaactccggcggctgcgtgcggggtttcagtcccagctgtaggcttgtaaatacccgccccgccaaaccgcatagagaacgtggcagcaagctga

SEQ ID NO: 215 - DNA, 115 bp, Homo sapiens
aggagctgaggtgctacccggagccccattcacccccacctgcccacttgggaatctgaggcagaggagggtgaggcctgtgtgccaaccttgttcacataccaccttcgtcccc

SEQ ID NO: 216 - DNA, 82 bp, Homo sapiens
cagatgttggtatctgcagggatcctggaaccaaacccctgcagatactaagggctgacgatctaggtaagactggatttaa

SEQ ID NO: 217 - DNA, 107 bp, Homo sapiens
taaatataatatcgacacagtgctttccgtggcactgcatacaatctgaggcctcctctctcagtttttatatagatggcgagaacctaagtttcagttgattttac

SEQ ID NO: 218 - DNA, 270 bp, Homo sapiens
ccagggctgagagacacgtgaaggaagatgatgggaggaaaagcccaggagaagtcccaccagggaccagcccagcctgcatacttgccacttggccaccaggactccttgttctgctctggcaagagactactctgcctgaacactgcttctcctggaccctggaagcagggactggttgagggagtggggaggtggtaagaacacctgacaacttctgaatattggacattttaaacacttacaaataaatccaagactgtcatattt

SEQ ID NO: 219 - DNA, 88 bp, Homo sapiens
gccctcatggttggcatcacatatgcctgcatgccattaacaccagctggccctacccctataatgatcctgtgtcctaaattaatat

SEQ ID NO: 220 - DNA, 227 bp, Homo sapiens
gaagatgaagccccatgctcagtcccctcccatcccccacgcagctccaccccagtcccaagccaccagctgtttgctcctggtgggaggtggcctcctcagcccctcctttctgacctttaacctcactctcaccttgcaccgtgcaccaacccttcacccctcctggaaagcaggcctgatggcttcccactggcctccaccacctgaccagagtgttctcttca

SEQ ID NO: 221 - DNA, 281 bp, Homo sapiens
ggagacagatggagggtaccctatttacaactgagtcagccaagccactgatgggaatatacagatttaggtgctaaaccatttattttccacggatgagtcacaatttgaagaatcaaacttccatcctgaaaatttatatgtttcaaaaccacttgccatcctgttagattgccagttcctgggaccaggcctcagactgtgaagtatatatcctccagcattcagtccagggggagccacggaaaccatgtttttgcttaagccattaaagtcagaga

SEQ ID NO: 222 - DNA, 272 bp, Homo sapiens
agagctcttgagtgggctagtgactccccctgcagcctggtggagatggtgtgaggagcgaagagccctctgctctaggatttgggttgaaaaacagagagagaagtggggagttgccacaggagctaacacgctgggaggcagttgggggcgggtgaactttgtgtagccgaggccgcaccctccctcattccaggctcattcattttcatgctccattgccagactcttgctgggagcccgtccagaatgtcctcccaataaaactccat

SEQ ID NO: 223 - DNA, 151 bp, Homo sapiens
tagggattaacttcctgtatgctgcaactcatgaacttggccattctttgggtatgggacattcctctgatcctaatgcagtgatgtatccaacctatggaaatggagatccccaaaattttaaactttcccaggatgatattaaaggcat

SEQ ID NO: 224 - DNA, 251 bp, Homo sapiens
agagagtggacatttgtcgggaaactcctaacatatgcccccattctggagagaacacagagtacgacacaatccctcacactaatagaacaatcctaaaggaagatccagcaaatacggtttactccactgtggaaataccgaaaaagatggaaaatccccactcactgctcacgatgccagacacaccaaggctatttgcctatgagaatgttatctagacagcagtgcactgcccctaagtctctgct

SEQ ID NO: 225 - DNA, 262 bp, Homo sapiens
gttcacccggtgaactatttatgagttcttttggtgtgaagaaagggctcatgttgcatttccagccattgctacaaagaacctttatttgttcagtaacggtagaaaatccttcccgattaaaaacttcagacttgctgaatatcctgcaatgtcaagatgaccgatgttgagttgggtggatttgctaacgagtcagatttgaacatgaggctattggaacccaataggcgtcattgatggcggcaagccatagctttca

SEQ ID NO: 226 - DNA, 266 bp, Homo sapiens
gcttggggaacaatgatggtgcacaaaggcttagatttgccttgtctcaaaataaggaattttgtagtggttttcaaaaataattcaacaaagaaacaatacaaaaagtgggtagaattacctatcacatttcccaatcttgactattcagaatgctgtttatttagtgatgaggattagcacttgattgaagattcttttaaaatactatcagttaaacatttaatatgattatgattaatgtattcattatgctacagaactga

SEQ ID NO: 227 - DNA, 121 bp, Homo sapiens
ggcagcgacccggaaacagcgtatcactgagaccgagtcgccttatcaggagctccagggtcagaggtcggatgtctacagcgacctcaacacacagaggccgtattacaaatgagcccga

SEQ ID NO: 228 - DNA, 156 bp, Homo sapiens
gcagcaacagcaaatcacgaccactgatagatgtttatttttgttggagacatgggatgattattttctgttctatttgtgcttagtccaattccttgcacatagtaggtacccaattcaattactattgaatgaattaagaattggttgccataa

SEQ ID NO: 229 - DNA, 186 bp, Homo sapiens
gagacttgtatgaaagatggctgtgcctctgcctgtctcccccaccgggctgggagctctgcagagcaggaaacatgactcgtatatgtctcaggtccctgcagggccaagcacctagcctcgctcttggcaggtactcagcgaatgaatgctgtatatgttgggtgcaaagttccctacttcctg

SEQ ID NO: 230 - DNA, 163 bp, Homo sapiens
tgagcagactgcaccccaagctcccgactccaggtcccctgatcttggggcctgtttcccatgggattcaagagggacagccccagctttgtgtgtgtttaagcttaggaatcgcctttatggaaagggctatgtgggagagtcagctatcttgtctggtttt

SEQ ID NO: 231 - DNA, 222 bp, Homo sapiens
gacacagtcgggttgacccagggctgtctccctccagagcctccctccggacaatgagtcccccctcttgtctcccaccctgagattgggcatggggtgcggtgtggggggcatgtgctgcctgttgttatgggttttttttgcggggggggttgcttttttctggggtctttgagctccaaaaaataaacacttcctttgagggagagcacaccttcccaa

SEQ ID NO: 232 - DNA, 34 bp, Homo sapiens
gaaatcattgtgggattgctagctttccctctta

SEQ ID NO: 233 - DNA, 158 bp, Homo sapiens
tttggtgcagtttccagggtgcagtacagcagggcctgaatactggccctggactcccttttccagaacaccaggtgtggccacctggggctcaggtacacagtggggtctctcggaagccaccgtgtggttctttcacaggcacgtttattttgctg

SEQ ID NO: 234 - DNA, 252 bp, Homo sapiens
  misc_feature (180)..(182): n is a, c, g, or t
gtggagcagttggactgctctctctgctctcaggatgatactgtgagaacaatttaaatatgctaagcacatgtcaggaaacagttttgtggtctttggacactcgctgtagccattccgttccatttcaggtgattttattcatttcatttgtagaataaaataaatccatttcacacnnncacacacacacacacacacacacacacacaccctctatacaccactaaagcctcccattaaacccataga

SEQ ID NO: 235 - DNA, 107 bp, Homo sapiens
tactcccgaggctctgtacattgctgccacatactcctgccagcttgggggagtgttccttcaccctcacagtatttattatcctgcaccacctcactgttccccat

SEQ ID NO: 236 - DNA, 189 bp, Homo sapiens
ccctgcagagaatcacgtcctggaactgcatgttcttgcgactcttgggacttcattttaacttctcgctgccccagccatgttttcaaccatggcatccctcccccaattagttccctgtcatcctcgtcaaccttctctgtaagtgcctggtaagcttgcccttgcttaagaactcaaaacatagct

SEQ ID NO: 237 - DNA, 82 bp, Homo sapiens
tttaaaatactcagaggacaggatcactgtggaatcgaatcagaagtggtggctggaattccacgcaccgatcagtactggg

SEQ ID NO: 238 - DNA, 190 bp, Homo sapiens
cacagggaaatcagggttacaaatcttcttgatccacttctctcaggatcccctctcttcctacccttcctcaccacttccctcagtcccaactccttttccctatttccttctcctcctgtctttaaagcctgcctcttccaggaagacccccctattgctgctggggctccccatttgcttactttgc

SEQ ID NO: 239 - DNA, 185 bp, Homo sapiens
ttgacaggtgggcccagtgaacttttccagtaaatgaagcaagcactgaataaaaacctcctgaactgggaacaaagatctacaggcaagcaagatgcccacacaacaggcttattttctgtgaaggaaccaactgatctcccccacccttggattagagttcctgctctaccttacccacagat

SEQ ID NO: 240 - DNA, 160 bp, Homo sapiens
gaaaatgggctcttgacaccaacattgaaagcaaagcgaggagagctttccaaatactttcggacccaaattgacagcctgtatgagcacatccaggattaggataaggtacttaagtacctgccggcccactgtgcactgcttgtgagaaaatggatta

SEQ ID NO: 241 - DNA, 239 bp, Homo sapiens; identical to SEQ ID NO: 36

SEQ ID NO: 242 - DNA, 244 bp, Homo sapiens
cactcccgggactattgccaagaaggggcaagggatgagtcaagaaggtgagacccttcccggtgggcacgtgggccaggctgtgtgagatgttggatgtttggtactgtccatgtctgggtgtgtgcctattacctcagcatttctcacaaagtgtaccatgtagcatgttttgtgtatataaaagggagggtttttttaaaaatatattcccagattatccttgtaatgacacgaatctgca

SEQ ID NO: 243 - DNA, 192 bp, Homo sapiens
agatcatccgccagcgggaacaacgcgttggagctctcccagctggagtaacagatcctggaaccaacagccgacatgttgcaccttgcccgcaagtacaaggaccctggagcacaagtccccgcccctgggcccattggcccccaacccaatcaaaaatctttcccccaccttgaggaagcactgcccaaa

SEQ ID NO: 244 - DNA, 214 bp, Homo sapiens
ggatcttgatgcctgaaaatcccaagattggtacttggcaaactgaaagaaatctagaaaaccctagagatcaggcatctgtggccagctaactggtcatacaaatggattgttgtggtgaacttgtatagtattaatcctgagatgctgtccccctccacccccacccccacaaaaaaaataaataaagtagtattaagttagcctcatacaa

SEQ ID NO: 245 - DNA, 164 bp, Homo sapiens
ccatggcaatgcgggtgactcctttacatggcacaacggcaagcagttcaccaccctggacagagatcatgatgtctacacaggaaactgtgcccactaccagaagggaggctggtggtataacgcctgtgcccactccaacctcaacggggtctggtaccgcg

SEQ ID NO: 246 - DNA, 249 bp, Homo sapiens
  misc_feature (128)..(128): n is a, c, g, or t
attgactattgactcgtgcatagaatccaatgctgtaattagaaagtaatctgtgactagaatagacctttgtccctgttagtagccctgttgccatgttcaggcttttaaaaaatgcttttgtgtcnccaaatatatctataaagaaaacaaaatttctgttcagaggcctctgaaacttggctttcttacatgtggttggtttatgtgacaatccctatgaaatgagtggacgtatgatttttgaat

SEQ ID NO: 247 - DNA, 270 bp, Homo sapiens
ctctcttccttcctgctattgactactgtgcagactcagctggattttagataatctttataatatcacaatggtttccatggagatggatcatgatgtcacaaaagtagatatatattctttggatactgaaaaatcaaagggcaatagagggaggaagagaagaattttcaaactggtatatagaggagggggaaatctagagaacaggaaagaaaactaagaaagggtgtgagtgaaacagagaaatggctattcaaaggctattca

SEQ ID NO: 248 - DNA, 256 bp, Homo sapiens
tgtggaccagaaacaggccactctccctgctgcaggtgttgcttagcaatcaaaaagcaaatcctctttctaactgggctgtgccacagttaaagtttcataaacctaaccatgctctgcccacctttagaggaggaagttaaactcagccctaaaaaaattatagaaaagtacacatctgctaataaaattggttgatatggtatttcaataaaggctcagtttaaaaaccagcgcttaaggcagtataatctct

SEQ ID NO: 249 - DNA, 229 bp, Homo sapiens
ataggggcctcaattcagcccttgacagtgtggttcaggaatgcagttccaaaatacactcatgttacctaagccttgagttcctcaggtgggcctctgagggccagcagggaagacaaggtcagccagctttaggcttgggtgtggacttggtggccaccattactagtttaataagatcttactggtggcttaggcaagttggctgttcctcaggaggttattggca

SEQ ID NO: 250 - DNA, 210 bp, Homo sapiens
cctcacattgaggaacactgcttatcaagagtttcaggagaccccaacgttgagaattcagttctgagccatcccaacttcttaggattgttgtgcggtggttaaaactttcttgttaagagtttttgagatctttggacgaaaggtttctggataaatttatatcacaaattagtaagggtttcatagtaaggtggctttcttttccct

SEQ ID NO: 251 - DNA, 289 bp, Homo sapiens
aacagtcattctgtcgttatccacccaattttcaaaatcaagccccatgtaaatagtcatttccataaatcctgtcaagaaaattaatttttagggtacagtcattggttttattgtagtcctcctaatcctgtgtgacatagatcctttggaaagttggtgctaccagttgggaagtgccccagcaggccccgtggttgtctggctttgttgactgtctgaatgcaacacgttgacaatgggttagctgctttggttttagggttattctccttatgcctcatgcaaa

SEQ ID NO: 252 - DNA, 198 bp, Homo sapiens
aaatcctctttctaactgggctgtgccacagttaaagtttcataaacctaaccatgctctgcccacctttagaggaggaagttaaactcagccctaaaaaaattatagaaaagtacacatctgctaataaaattggttgatatggtatttcaataaaggctcagtttaaaaaccagcgcttaaggcagtataatctct

SEQ ID NO: 253 - DNA, 172 bp, Homo sapiens
gttaacttacttaaagtcatgtcgcaagaaagatcaaacccatgaatgcttagtagctaaggctagtgttcaaaagcactttaaaagacattttgtccacattttggaaaagaaaatatttgcatgtttaattcataatttaggctatctttgagtatactgtaaagtgctg

SEQ ID NO: 254 - DNA, 220 bp, Homo sapiens
aaggataaacaaggcctgcgtccagacagagttgtttctctgaaacattgctggcttcttctgagtttgattcagctgttctctgatgaaattcagggaaaacttgccttcagagatatctctcaaattttactaatcttcagctttagttggtcaacattcattccacaaatatcaattgaactcctactgtgggcctggtggtggtctgagtgctgaa

SEQ ID NO: 255 - DNA, 205 bp, Homo sapiens
aacaaagttatgttctagtatggttttaaaagtcttcccttttggttatttggaaaatagtgcaaacgtgcggtctagtggttatggccaaaggcagagcaaagggagtgcggccttagccagccccagccagctgccattgctcccacgctctgtgtggtcttgacccaatgcccagaaaagcaaggttccccactttctacct

SEQ ID NO: 256 - DNA, 177 bp, Homo sapiens
aattcacttggcctgcaaacaacagagttatccgtattttccacatgtgaatgtcattgcaagggtgactctagacaaactacaaaccgatggaccgtcaagctccccaggagccccttggatggcagcgttgcttcagagtgtttcctgtttctggaattccttgttagggaactt

SEQ ID NO: 257 - DNA, 168 bp, Homo sapiens
cagctttcagacagagcccacttagcttgtccacatggatttcaatgccaatcctccatttttcctctccagatatttttgggagtgacaaacattctttcatcctacttagcctacctagatttttcatgacgagttaatgcatgtccgtggttgggtgcacctgta

SEQ ID NO: 258 - DNA, 42 bp, Homo sapiens
tcatgacgagttaatgcatgtccgtggttgggtgcacctgta

SEQ ID NO: 259 - DNA, 250 bp, Homo sapiens
gatttctcatgacgagttaatgcatgtccgtggttgggtgcacctgtagttctgtttattggtcagtggaaatgaaaaaaaaaaaaaaaaaaagtctgcgttcattgcagttccagtttctcttccattctgtgtcacagacaccaacacaccactcattggaaaatggaaaaaaaaaacaaaaaaaaaacaaaaaaatgtacaatggatgcattgaaattatatgtaattgtataaatggtgcaacagt

SEQ ID NO: 260 - DNA, 225 bp, Homo sapiens
ttctttctggcccagttaatttgcacagaacttttctcagtttggtattttttactgcttggagatccagaagagaattagaaacaacatagcaaattaaaataggtttgtcaataatagagctcagacacctgtgtgctgtagattcacatacaggccgtgaacctaagtggggaaaatcctacctatccaccttctggctagattacctagcttagtgaaaag

SEQ ID NO: 261 - DNA, 210 bp, Homo sapiens
cctacagacacccatcgggtgggtaggaggaacagatttgagaaatgggcaggagatgtaggaggggaactaggttaccgcttatcagatggcataaattttcaaggagaatcaaaatgcaaaacttgggaataaatcatagcaatatcataattaatgtagtagtaatattgctgtttattaatgctgaagtgtggttttcctaactgt

SEQ ID NO: 262 - DNA, 197 bp, Homo sapiens
gggatgtacctgaaacctagtgagagtcatcctgactctggggaagagccgttcaaagatgagaaagataaagtaatttgccacccccaacccctcacaggctagactatccatggatttcagtggggtggtgagtcctcatgatccctgaacctctcctcaaatggtgactgttctgggggtcctttctctgcctt

SEQ ID NO: 263 - DNA, 261 bp, Homo sapiens
tcttttccatacactgtgtgctatttgtgttaacatggaagaggattcattgtttttatttttatttttttaattttttcttttttattaagctagcatctgccccagttggtgttcaaatagcacttgactctgcctgtgatatctgtatcttttctctaatcagagatacagaggttgagtataaaataaacctgctcagataggacaattaagtgcactgtacaattttcccagtttacaggtctatacttaagggaa

SEQ ID NO: 264 - DNA, 253 bp, Homo sapiens
gggcattcaaagttatcctttggataatgatgatttaaaactttcttttattatcccatgtgctcagagtaaggggcaaatgaatcagttgtgaaatatgtgttccttgtaggacacaggcactcttgagatctatagcttcaataaaaaggtaatttatttaaattactgcctctttaatttataatgttttggggatttttaataggcatgctctgtaagggcactggtaatcagctgtttctgattttac

SEQ ID NO: 265 - DNA, 38 bp, Homo sapiens
tgctgtaattaagaaagcagtgtaaggctgggcgcagt

SEQ ID NO: 266 - DNA, 219 bp, Homo sapiens
atgtctcgccgcaagcaaggcaaaccccaacacttaagcaaacgggaattctcgcccgagcctcttgaagccattcttacagatgatgaaccagaccacggcccgttgggagctccagaaggggatcatgacctcctcacctgtgggcagtgccagatgaacttcccatagggggacattcttatttttatcgagcacaaacggaaacaatgcaatggc

SEQ ID NO: 267 - DNA, 253 bp, Homo sapiens
agcctaggcctgcagcgccattttatttatattttttaataaaaagtaaaaacaaaaaaacagacccacattggaacagtgaatcagtcccatagagagggcccgtggaccatcgctgtcatgagtgatgccctggcccttttgaaaccagccaacctaattacctgtattgtggaaatgcgcatgagtccccaaccccttgtttctatacattctatgttgtcttttaaaaagtgtgcttaacattgacaca

SEQ ID NO: 268 - DNA, 298 bp, Homo sapiens
tttagcatcttggagccgtgtcagctgcagagactggagtccggggcatgatggggatgtacctgaaacctagtgagagtcatcctgactctggggaagagccgttcaaagatgagaaagataaagtaatttgccacccccaacccctcacaggctagactatccatggatttcagtggggtggtgagtcctcatgatccctgaacctctcctcaaatggtgactgttctgggggtcctttctctgcctttctcagggggtaaccagaggtggtggtgtggtccactgtgactcgtca

SEQ ID NO: 269 - DNA, 259 bp, Homo sapiens
  misc_feature (143)..(144): n is a, c, g, or t
aatgaaagctgtttgtcgtaacttgaaattttatcttttactatgggagtcactatttattattgcttatgtgccctgttcaaaacagaggcacttaatttgatcttttatttttctttgtttttatttttttttttatttanntgaccaaaggtcattacaacctggctttttattgtatttgtttctggtctttgttaagttctattggaaaaaccactgtctgtgtttttttggcagttgtctgcattaacctgtt

SEQ ID NO: 270 - DNA, 192 bp, Homo sapiens
  misc_feature (135)..(135): n is a, c, g, or t
tgggactagaggaaggacttaaactcatacctaacttcaccttttgatcttgatgcccctgggtgtgtagtgccagtcctgagcccttggtcatggggcctttcctgtaccctcaggacccctgactcatggctnccccaccccccaaccccatgccattgccaattctctaaatgcattcacaaacacaaa

SEQ ID NO: 271 - DNA, 136 bp, Homo sapiens
tgcatgcttccaatttaagaggtataaaatagtccttcgatgtggtttttattttgcctttctttgactgtgaatgaccttggccatttcctcatattttttggttattgtatttgcacttgcacaccttgtctct

SEQ ID NO: 272 - DNA, 33 bp, Homo sapiens
aggtgatgcctggcttgacacttctggtaactc

SEQ ID NO: 273 - DNA, 243 bp, Homo sapiens
aggattgagcgcagggagcaaatcattcaggaaatatggatgaacagtggtttggacacctcgctcccaagaaacatgggccagttttactgaaaaccacatgcatcttgatgcgatcgcactttttgaagaaggaaggatcccaaatgcccctccagttttggttcacctgtaccttctatgaaggagaattcgtcatgtcattcaacactcgtgaggccaggaagctattaaagggatgtt

SEQ ID NO: 274 - DNA, 174 bp, Homo sapiens
aaacaaaacaaaaggctgggcgcggtgactcacgcttgtaatcccagcactttgggaggcctaggcaggcagatcacctgaggccaggagttcgagaccagcctggccaacatagtgaaagtctctactaaaaatacaaaaattagccggatgtggtggcagtcacctgtaatc

SEQ ID NO: 275 - DNA, 51 bp, Homo sapiens
cagcctccaacacaaggctccaagacctaggctcatggacgagatgggaag

SEQ ID NO: 276 - DNA, 208 bp, Homo sapiens
ttggccttggcttttctagcctatttacctgcaggctgagccactcttttccctttccccagcatcactccccaaggaagagccaatgttttccacccataatcctttctgccgacccctagttccctttgctcagccaagcttgttatcagctttcagggccatggttcacattagaataaaaggtagtaattagaacactttgcaa

SEQ ID NO: 277 - DNA, 211 bp, Homo sapiens
accgaaagtactgaccaagtgccaggaagaggtcagccacatccctgctgtccacccgggttcattcaggcccaagtgcgacgagaacggcaactatctgccactccagtgctatgggagcatcggctactgctggtgtgtcttccccaacggcacggaggtccccaacaccagaagccgcgggcaccataactgcagtgagtcactggaa

SEQ ID NO: 278 - DNA, 285 bp, Homo sapiens; identical to SEQ ID NO: 208

SEQ ID NO: 279 - DNA, 224 bp, Homo sapiens
tcagtgcacgatgctccagccacactggccatctttcggttcctgatacaaaaaaaaacacgttccttttccatggaaagcaggtcacccttgttattttgtatcgatgacaactctttaaacttattttgctttttggctttatgtatgtgtgtgggtgggtgggactgactgccccactagaatgtaagctccatgagggcagggaatcttgctttcttgtt

SEQ ID NO: 280 - DNA, 267 bp, Homo sapiens
ggaggcagacaatgaccccacggctcctccttatgactccattcaaatctacggttatgaaggcaggggctcagtggccgggtccctgagctccctagagtcggccaccacagattcagacttggactatgattatctacagaactggggacctcgttttaagaaactagcagatttgtatggttccaaagacacttttgatgacgattcttaacaataacgatacaaatttggccttaagaactgtgtctggcgttctcaagaatc

SEQ ID NO: 281 - DNA, 257 bp, Homo sapiens; identical to SEQ ID NO: 59

SEQ ID NO: 282 - DNA, 256 bp, Homo sapiens
actgcattgctggaccctctgtgaaactgaagccttctctacttgtttttatctcaagtgaacctggagaagcaacaataatggaccttctcccctagtcaaatagcctgtggacctcccctcatagtcagtctccaaaaacatgtatctggaattaatttattacaaagagaagtttagtgtttcttcttttttacatgcgctcaatactgactactggccagacacagcaccatcctcttacaaacatcatttc

SEQ ID NO: 283 - DNA, 260 bp, Homo sapiens
cttgaacatgggaaggagttgttgcagtaagccaagatgtgccactgtactccagcctgggagacagagtgagactctgtctcaaaaaatgaatgaataaataaataaataaataataaaaaagatgattattaacaatgccagttaatattaacaatattaatagtattatttattactaatgccattttttcatttttgttaaagtatttttattattttagtttaaattattattatgagacaaaggcctccatttc

SEQ ID NO: 284 - DNA, 273 bp, Homo sapiens
ccttgaaaagcagtgtcagagcagaattataaggcatttttaatattccctgttttaataaaactttttttatgtttgatttttttttatattttttgtccgcacgtatatagatgtggatacataacatttaacacggttgcaatcagagggtgatttgatttgttaacttaatgtcacatcataaacattttacatgctgttatataatgtacataatcatttttaatgactacataacatcccatcctattgacgaatcattatgtcctt

SEQ ID NO: 285 - DNA, 240 bp, Homo sapiens
  misc_feature (28)..(28): n is a, c, g, or t
  misc_feature (163)..(163): n is a, c, g, or t
aagtatacagctgtaagtaaccctgtcnccatggatgatccttttctctaggaatgtatttggattagagatgacaactacattttcgcatttttatgttgaagtcttttttaaaaaggctgtttacttttcagtagttaagaatacttgtttttctttttcnttttttttttttttaaccttttattttttcgttaagcctctattgtttgtagaacactcttagaaacttggaaataa

SEQ ID NO: 286 - DNA, 221 bp, Homo sapiens
ggcagccctgacgtgatgagctcaaccagcagagacattccatcccaagagaggtctgcgtgacgcgtccgggaggccaccctcagcaagaccaccgtacaattggtggaaggggtgacagctgcattctcctgtgcctaccacgtaaccaaaaatgaaggagaactactgtttacaagccgccctggtgtgcctgggcatgctgtgccacagccatgcct

SEQ ID NO: 287 - DNA, 129 bp, Homo sapiens
gatccagaactgtggctgggcaccgtggctcacatctgtaatctcatcactttgggaaggctaaggcgggtggatcacctaaggtaaggagttcgaacccagcctttacaatgtaatgaaaccctgcct

SEQ ID NO: 288 - DNA, 108 bp, Homo sapiens
ggtggaagaccagtaattgctggaagactggatttgctggaagacttgatttactggaagacttggagcttcttggaagacatggattgtccggaagacatggattgt

SEQ ID NO: 289 - DNA, 45 bp, Homo sapiens
ggaggagtgagtccctatgctgaccccaatacttgcagaggtgat

SEQ ID NO: 290 - DNA, 106 bp, Homo sapiens
tttaggtcagttaagacgcaagcaggaacagccatgcttccaggattaggaattttactgaatgatccatggcaccccactgcctctgcaggttggtgtaatcagc

SEQ ID NO: 291 - DNA, 48 bp, Homo sapiens
atgttttttaccaaatgatcggtagggagatacaagggaataaagaac

SEQ ID NO: 292 - DNA, 70 bp, Homo sapiens
cctgccagaatctgccgcccctccatcttctacctctgaatggccacccttagaccctgtgatccatcct

SEQ ID NO: 293 - DNA, 56 bp, Homo sapiens
tcctttgtactggaggagtgagtccctatgctgaccccaatacttgcagaggtgat

SEQ ID NO: 294 - DNA, 223 bp, Homo sapiens
caaggtcagcgtaggtaaggatgcaactgaaggtcctgggctgcacctatgctctccaggcaacacctcccactttctacagatcctacactccacccatcctcaatgcagccccattccttgcaccccagaccagtcagggatgggggaagacgtgaagttaggaatgacacggggccagaggcaggaagctgcccacaaagaggtggtacctactctccta

SEQ ID NO: 295 - DNA, 106 bp, Homo sapiens; identical to SEQ ID NO: 290

SEQ ID NO: 296 - DNA, 209 bp, Homo sapiens
catcctcatgactgatggattgcacaacatgggcggggacccaattactgtcattgatgagatccgggacttgctatacattggcaaggatcgcaaaaacccaagggaggattatttggatgtttatgtgtttggggtcgggcctttggtgaaccaagtgaacatcaatgctttggcttccaagaaagacaatgagcaacatgtgttca

SEQ ID NO: 297 - DNA, 201 bp, Homo sapiens
ctcccagtggattcactgtccacggcctcccaacatctccagaccggccaggctccaccagccccttcgctccatcagccactgacctgcccagcatgcctgaacctgccctgacctcccgagcaaacatgacagagcacaagacgtcccccacccaatgcccggcagctggagaggtctccaacaagcttccaaaatggc

SEQ ID NO: 298 - DNA, 292 bp, Homo sapiens; identical to SEQ ID NO: 175

SEQ ID NO: 299 - DNA, 94 bp, Homo sapiens
aattcaaagcgctcagaaagtattagctcaataagtgatgactgtgtgccagacactgtgctaaactcctactcaagagggataagagtctagg

SEQ ID NO: 300 - DNA, 266 bp, Homo sapiens
taacatgttggctgtcattattacatatatctgtgtttcattcttgcctctggctggaatgttcttcccagctctccatatggctgatttctcatccttcgggacttgccccattctccaaccccatcactagttttatctttttcacttatttatgcagtctgctcttgtcctaggacatgagctccaggagggcgggaaacatctcgctttgtacactgctgtgccctctgtacccagcaaggcgcctgtgtataataggtgct

SEQ ID NO: 301 - DNA, 112 bp, Homo sapiens
ggaaaccggatgagaggaaagacctggaagctattgtaaaatctatgctgagggtctggtgactactagaccaagggcatggcagcagagggcagctgaaagacttcaggaa

SEQ ID NO: 302 - DNA, 90 bp, Homo sapiens
gggtttgagttcataccctgttaccattttggggtacccactgctctggttatctaatatgtaacaagccaccccaaatcatagtggctt

SEQ ID NO: 303 - DNA, 277 bp, Homo sapiens
agacaccttgacagggcacaccgggcactcagaagacactgatgggcaacccccagcctgctaattccccagattgcaacaggctgggcttcagtggcagctgcttttgtctatgggactcaatgcactgacattgttggccaaagccaaagctaggcctggccagatgcaccagcccttagcagggaaacagctaatgggacactaatggggcggtgagaggggaacagactggaagcacagcttcatttcctgtgtcttttttcactacattata

SEQ ID NO: 304 - DNA, 289 bp, Homo sapiens
tccaaatggtcacttttcctcgcaggcctctctttgcatacaaatgtctccctcctgacgctcacctttttccctggggctctcaaatgtcttcttttcagatttcgtagcttttctttctttagcatcacttgagggcaagtggtgctccaactgtctccccccagagttttgccgcctgtactttcccacacctcagtctcctcgcctgtagaaaggggtcaatcgtttgaaccctgcttcacttggtgtgtatgtgaaggtgctttgaaatcaagtgctttgcaaa

SEQ ID NO: 305 - DNA, 211 bp, Homo sapiens
gaaaaaactttctctttgccatttcttcttcttcttttttaactgaaagctgaatccttccatttcttctgcacatctacttgcttaaattgtgggcaaaagagaaaaagaaggattgatcagagcattgtgcaatacagtttcattaactccttccctcgctcccccaaaaatttgaatttttttttcaacactcttacacctgttatgg

SEQ ID NO: 306 - DNA, 130 bp, Homo sapiens
tcttttttcagaatctattaaggacacttgaaagttttgaaatttttggtaaatttggactaccatgaggaaacttttgagattcaagttcattctattcagagcaattccgatattgatgttaacttga

SEQ ID NO: 307 - DNA, 233 bp, Homo sapiens
caattttgtgcctaaattgcacattagaagatggattgattggacacatccatgtaattcaaagttattattcaaatttgacttaattggtaatcattgaaaaaactgactaatgtcatttagtgtgaaggagcactggccagctatatgccacactcatacatatgcattttcagaatgtgagcagcttttctgaatttttaatcaaaccttttcaccaactttactgaatg

SEQ ID NO: 308 - DNA, 152 bp, Homo sapiens
gtaaatcactgtaaacgtgtcttcatttactctagccaaaaggcctggcttctgataggaaactggtaagaaactcttcatgaaaacacatcactaatattcgctattactctcctggtctgaagtcagcttttctgaaccattaaggtatt

SEQ ID NO: 309 - DNA, 175 bp, Homo sapiens
gagttgtatcgtgtggtgtattttttaaaaaatttgatttagcattcatattttccattttattcccaattaaaagtatgcagattatttgcccaaagttgtcctttttttcagattcagcatttgttttttgccagtttcattttcatttttttccatggttccacagaagctt

SEQ ID NO: 310 - DNA, 226 bp, Homo sapiens
taaaggtggtttggcctctaatttaattttgattcagactctcctgtcaggactcaagaaaatttaattaattaccaaggattaagttttttggttaaggtttttgggaaaaaaaaatagcaaagatgttgatttcttggaatccttttacaggttcataacagaaaaatcttcattccctgtaggcatttaattaaacctagttgagaagtgtgtgggattcctc

SEQ ID NO: 311 - DNA, 270 bp, Homo sapiens
ctgttcctttcctgggttccaattttgtgcctaaattgcacattagaagatggattgattggacacatccatgtaattcaaagttattattcaaatttgacttaattggtaatcattgaaaaaactgactaatgtcatttagtgtgaaggagcactggccagctatatgccacactcatacatatgcattttcagaatgtgagcagcttttctgaatttttaatcaaaccttttcaccaactttactgaatgcctactggaattccataa

SEQ ID NO: 312 - DNA, 215 bp, Homo sapiens
caaggccctgctgtaagtatgatttggggaaataataaagaagatcacggacctaggaatgttttcttcagactaaaccaagacaactttgacaacccattaagttagccccatttcaatatatcctctaaaatatctggaaattgtctaaatgcaatgggctgtaagtccatccctgcagtgggcctgggggctcgttatttatttatggtgaa

SEQ ID NO: 313 - DNA, 181 bp, Homo sapiens
gagttgtatcgtgtggtgtattttttaaaaaatttgatttagcattcatattttccatcttattcccaattaaaagtatgcagattatttgcccaaatcttcttcagattcagcatttgttctttgccagtctcattttcatcttcttccatggttccacagaagctttgtttcttgggca

SEQ ID NO: 314 - DNA, 225 bp, Homo sapiens
ttttctgcacatttacttgcttaaattgtgggcaaaagagaaaaagaaggattgatcagagcattgtgcaatacagtttcattaactccttccctcgctcccccaaaaatttgaatttttttttcaacactcttacacctgttatggaaaatgtcaacctttgtaagaaaaccaaaataaaaattgaaaaataaaaaccataaacatttgccaactttcttgtac

SEQ ID NO: 315 - DNA, 211 bp, Homo sapiens; identical to SEQ ID NO: 40

SEQ ID NO: 316 - DNA, 68 bp, Homo sapiens
ctggaaaagatggtcgcactggacatcctggtacagttggacctgctggcattcgaggccctcagggt

SEQ ID NO: 317 - DNA, 83 bp, Homo sapiens
taataacatggcacgatgaatgcttctttagagtaaaaaggttttctttaacttgttaagtcagagttgtctaagtaattgta

SEQ ID NO: 318 - DNA, 275 bp, Homo sapiens; identical to SEQ ID NO: 57

SEQ ID NO: 319 - DNA, 65 bp, Homo sapiens
ttaactccatatgtgttcctcttgttttaattttgtcaaccagtgcaagtgaccgacaaaattcc

SEQ ID NO: 320 - DNA, 286 bp, Homo sapiens; identical to SEQ ID NO: 16

SEQ ID NO: 321 - DNA, 111 bp, Homo sapiens
aattgatggctcttgatttgcagctgtatctggagcttaccgaatctagtgcagctttaaaaatagggagccgattctgtttccaagttcagaaggagcagcgatttggca

SEQ ID NO: 322 - DNA, 261 bp, Homo sapiens; identical to SEQ ID NO: 159

SEQ ID NO: 323 - DNA, 257 bp, Homo sapiens
tcagcagggcatcgcatggaccgcaggagggcagattcggaccactaggcctgaaatgacatttcactaaaagtctccaaaacatttctaagactactaaggccttttatgtaatttctttaaatgtgtatttcttaagaattcaaatttgtaataaaactatttgtataaaaattaagcttttattaatttgttgctagtattgccacagacgcattaaaagaaacttactgcacaagctgctaataaatttgtaa

SEQ ID NO: 324 - DNA, 139 bp, Homo sapiens
gaaaaagaaatacaccccatttctggtgccagtcagtgtctgtctgtctctgtatacatacttatgtataaatatgtgtttgtatatatgtttatatacatatatatttgttcatgttattttggtttgacacttttaa

SEQ ID NO: 325 - DNA, 226 bp, Homo sapiens
tcactgccaattccagcacgaagttgggcgactgccaggcaggcactcccagtcgtcaaaaagtgcaaatgttactcagggaacaattaatgtgagttgtgtaatgtaatatgggtcaaaaacatgaaaagacgtttaaaatgtcagcggatggctcagcccacccatcagccagccagagagcagaacacctgttttgcactcagtggcacagaagccacaattt

SEQ ID NO: 326 - DNA, 263 bp, Homo sapiens
tcaggcccggagaccgggtgttcctccagatgccctcagaacaggctgcaggactgtatgccgggcagtatgtccactcctccttttcaggatatttattgtatcccatgtaaaaacaaaaaaacaaaaaacaaagaaaagaaagagattttatagaagaaaatgacacaccaaaaaatccaaatgaaaaacataattgcttcaaaacacttacacagttggaaagttatatgtaagtgaaaatttggaccattgtgtacaaa

SEQ ID NO: 327 - DNA, 245 bp, Homo sapiens; identical to SEQ ID NO: 63

SEQ ID NO: 328 - DNA, 212 bp, Homo sapiens
  misc_feature (125)..(125): n is a, c, g, or t
acaggccagattatacaatacttctgtgcacaccagatggttgtaaagaaagatcagcgagaaaggctttggaagttttaatccttctttccaccttttttcccccgcatttagtaaatcacaancctacctgactggcatccaattatcagagatattcagtgtttaagctaccctctttaaaagaaaatgatctcttcttattcctaagg

SEQ ID NO: 329 - DNA, 221 bp, Homo sapiens; identical to SEQ ID NO: 120

SEQ ID NO: 330 - DNA, 224 bp, Homo sapiens
tacccacccctaaatcattccagtgctctcaaaaagcatgtttttcaagatcattttgtttgttgctctctctagtgtcttcttctctcgtcagtcttagcctgtgccctccccttacccaggcttaggcttaattacctgaaagattccaggaaactgtagcttcctagctagtgtcatttaaccttaaatgcaatcaggaaagtagcaaacagaagtcaata

SEQ ID NO: 331 - DNA, 174 bp, Homo sapiens
gatagttgtacaataatgtctgagtacttaatgccactaaactgtacacttaaatgtctaaaatggtaaaattttatgtatattttacctcaattaaaaagaaaacaccttggcccccaaaggtacttttgccaaagaaccaaggctgaaatttcttgctaaatgagataatta

SEQ ID NO: 332 - DNA, 189 bp, Homo sapiens
gatagttgtacaataatgtctgagtacttaatgccactaaactgtacacttaaatgtctaaaatggtaaaattttatgtatattttacctcaattaaaaagaaaacaccttggcccccaaaggtacttttgccaaagaaccaaggctgaaatttcttgctaaatgagataattaaatgtctttcattgc

SEQ ID NO: 333 - DNA, 181 bp, Homo sapiens
atctcaagatgaacaggtgcacctacttttgctccctcttttttttttttttctcttatgtgtggacccacataattcagttcctcaaacatttgctgagcacctacttgaggaggcagtattagggtcatggttaagagccagggccctgggttcacatcccagggtagctgtgaccttg

SEQ ID NO: 334 - DNA, 145 bp, Homo sapiens
caataaaagtggcagacctctttatccctgtttcacaaataaatggaggcacagaatggggaagtggaggccgagggaacaaagccaattaagactgccagcccggttccctggccacagcactgagggtttgaggggtgcctcc

SEQ ID NO: 335 - DNA, 249 bp, Homo sapiens
aaagtagaacctatggaatccattcaaaatctgtactgagcattgattgtatcgcactcctgtgtctaggccctttgcatatgcactcactcattcaacagactttgaccctgcctgctcttctgccaggccgtgtgctaagggcctgcgatcccaagataaatccctgtctccaagccaagcatgtgactttgaagcagtgtaacttggtgaggaacgtcttattttatctctttaccacatcaacag

SEQ ID NO: 336 - DNA, 222 bp, Homo sapiens
gtcccagggcggtagtgaatacgcagcagcggatcagatcagctttcagggccccgacaccccctgagcacctactgctttgcccttttaactggcacaaggttcagttatacaggccaagggtatcaagctagacttcctggttccattttcattgtatttttagcattgccttctgtgtatgacaaattttactgctttgggtgttatatggtgacataa

SEQ ID NO: 337 - DNA, 293 bp, Homo sapiens
gagccttcaggccagctgggtttagcccgaggctggttttagatgcagcgactgtttcaggggtgactcagaagaaaaagaagctgaggaagctgttggggggctgagggtgggattctcgctccttcatttcaggttactcgttcttcagcaagttggcaaaacagacatcatgctggtgagtgccacgttactcccctggctggaaatgcttttctgaaagtatgagtgttgtgcctacttaattctgataaacctgtttaagcaatacttaggaggcttacttctttgga

SEQ ID NO: 338 - DNA, 168 bp, Homo sapiens
gatacactatacaatcctatgaccaatctcatctacaactttattcaaattttatagaggctgaggtggaaggatcacttgagtttgaaaccagcctgggcaacatagtgagaccccgtctctacaaaaagtaggaaaaaaaaaatagcgaggtgttgtggtacacgc

SEQ ID NO: 339 - DNA, 118 bp, Homo sapiens
agggtatgaaggttctctctgtgtcatttcttaaaactccatgtgagtctatagtgagttttaaaaagaaaaagttccagcctgggcagcatagcgagacctattgtctctacacata

SEQ ID NO: 340 - DNA, 238 bp, Homo sapiens
atgctctaaaacagtgtaggatttaagaatagatggtttttaatcctggaaattgtgattgtgacccatgagtggaggaactttcagttctaaagctgataaagtgtgtagccagaagagtacttttttttttgtaaccactgtcttgatggcaaaataattatggtaaaaaacaagtctcgtgtttattattccttaagaactctgtgttatattaccatggaacgcctaataaagc

SEQ ID NO: 341 - DNA, 257 bp, Homo sapiens
caggctgtttgggcattaattttgctttttgagccttaagtgtgttagtaggatggagaaactgtgatgggggactgggaacctggattgtctgattttaggtcactgttccctgggcctgtttttgtgagcccttacacaggaagatataaagagagttctttcatttccctgctaaaatcagtatgtagtatggggaatgtatttgggttgtttttaaagaaaaggggaacagaatcaggagagtgggcaaaggc

SEQ ID NO: 342 - DNA, 238 bp, Homo sapiens
tctttcatcgccttccctcaaaaaaacctgctccgttgaagtaaactaagtaactcaatattctttattttggtttggaacctgtctcaattttttgtatccatattaagaagtcaccctataatctaaactttgtaattctaatttttttgtcccattatcatacaaagtgcttttaaacttgtttttaaaaaatgacagataatgccacatgaataggaagatgattcattctaaa

SEQ ID NO: 343 - DNA, 219 bp, Homo sapiens
tgttccacaaagaacgcaacacagtctttaaactttttggtgtaagcttttagccttgggtattttccagtggggaatgtttaaaaatatttgaccaaaccaaagactttttgccttttatagcaagcataaagactgtactgcctggcttttgtattccttcagacattattgtaaatgtgcaactccttttccctcttgtaaacctttataagatgt

SEQ ID NO: 344 - DNA, 173 bp, Homo sapiens
ttcaggatgtaggaggacatgtatagtatgtcaaaaactgcaagcttttcccaactttaaccttaccagcatgttaatatccagtttttttatagtttaaaagttaaagtgcctcatattttgaaaatatccattaaggacccaggaattagcatttcacttgtttatacatt

SEQ ID NO: 345 - DNA, 299 bp, Homo sapiens
acaagtcatatcaggatgcagttttagaagatatttttaagaagaatgaccatgatggtgatggcttcatttttcccaaggaatacaatgtataccaacccgatgaactatagcatatttgtatttttacttttttttttagctatttactgtactttatgtataaaacaaagtcacttttttccaagttgtatttgctatttttcccctatgagaagatattttgatttccccaatacattgattttggtataataaatgtgaggctgttttgcaaacttaacttgcaggaatggtca

SEQ ID NO: 346 - DNA, 237 bp, Homo sapiens
accctatgtcctttatttacaaagctgtgctcctattcatgagcatggaatgtttttccatttgtttgtgacattttttatttctttcaggggtatcttgtaattctcattatatatatcttttgcttccttggttagctgtatttttaggtattttagtcttcttgtggcaattgtgaatgggattgcattcctgatttggctcttggcttgaatgttattaacgccacatttttt

SEQ ID NO: 347 - DNA, 36 bp, Homo sapiens
cccactaagcaacttgtgacacccacctctgcccgc

SEQ ID NO: 348 - DNA, 225 bp, Homo sapiens
  misc_feature (140)..(143): n is a, c, g, or t
  misc_feature (145)..(147): n is a, c, g, or t
  misc_feature (149)..(149): n is a, c, g, or t
  misc_feature (151)..(151): n is a, c, g, or t
  misc_feature (153)..(157): n is a, c, g, or t
  misc_feature (159)..(165): n is a, c, g, or t
  misc_feature (167)..(168): n is a, c, g, or t
aaaatgaacagttaaggctcttaaagatccttgacatggctagcaacataatgattgtcactctacctggggcttccaagctacttggagtagggacaaaatatcttggctcacgtatttaagagcctgaatattccagnnnngnnnananannnnnannnnnnntnnattttaataacataacactgttgctcattttgtaagtataagtgttatagcagtttc

SEQ ID NO: 349 - DNA, 288 bp, Homo sapiens
ctgtcagataccctgtttctggagtcacatcagtgaggagggatgtgggtaagaggagcagagggcaggggtgctgtggacatgtgggtggagaagggagggtggccagcactagtaaaggaggaatagtgcttgctggccacaaggaaaaggaggaggtgtctggggtgagggagttagggagagagaagcaggcagataagttggagcaggggttggtcaaggccacctctgcctctagtccccaaggcctctctctgcctgaaatgttacacattaaacaggatt

SEQ ID NO: 350 - DNA, 197 bp, Homo sapiens
tgggcctgaataagggttatcgaatggtggtgaatgaaggttcagatggtggacagtctgtctatcacgttcatctccatgttcttggaggtcggcaaatgcattggcctcctggttaagcacgttttggggataattttctcttctttaggcaatgattaagttaggcaatttccagtatgttaagtaacacactt

SEQ ID NO: 351 - DNA, 133 bp, Homo sapiens
gtcataaagaaagcaagatgtcttgctttattaagaaaacttaaacagcactttggaagttaaggtgggcggattgcccaagcgcaggagttcgagaccagcctggacaacattggagaagccccatctcaac

SEQ ID NO: 352 - DNA, 359 bp, Homo sapiens
  misc_feature (35)..(36): n is a, c, g, or t
  misc_feature (38)..(39): n is a, c, g, or t
  misc_feature (41)..(41): n is a, c, g, or t
ctggtggcgacacgatctttgggaagatcatccgnnannanataccagccaaaatcatttttgaggatgaccggtgccttgctttccatgacatttcccctcaagcaccaacacattttctggtgatacccaagaaacatatatcccagatttctgtggcagaagatgatgatgaaagtcttcttggacacttaatgattgttggcaagaaatgtgctgctgatctgggcctgaataagggttatcgaatggtggtgaatgaaggttcagatggtggacagtctgtctatcacgttcatctccatgttcttggaggtcggcaaatgcattggcctcctggttaagcacgttttggggat

SEQ ID NO: 353 - DNA, 161 bp, Homo sapiens
  misc_feature (44)..(45): n is a, c, g, or t
  misc_feature (47)..(48): n is a, c, g, or t
  misc_feature (50)..(50): n is a, c, g, or t
tcgctcggcctggtggcgacacgatctttgggaagatcatccgnnannanataccagccaaaatcatttttgaggatgaccggtgccttgctttccatgacatttcccctcaagcaccaacacattttctggtgatacccaagaaacatatatcccagatt

SEQ ID NO: 354 - DNA, 206 bp, Homo sapiens
ttctcccttctacgtgtacatcattaatccccattgccaagggcattgtccagaaactcccctgagaccttactccttccagccccaaatcatttacttttctgtggtccagccctactcctataagtcatgatctccaaagctttctgtcttccaactgcagtctccacagtcttcagaagacaaatgctcaggtagtcactgtt

SEQ ID NO: 355 - DNA, 246 bp, Homo sapiens
ttttccagccctatagccaccccaagagtggttatgcctcctcgattgctccatactctaacatctagctggcttccctgtctattgccttttcctgtatctattttcctctatttcctatcattttattatcaccatgcaatgcctttggaataaaacatacaggagtctgtttttgctatggaatgccccatggggcatctcttgtgtacttattgtttaaggtttcctcaaactgtgattttt

SEQ ID NO: 356 - DNA, 93 bp, Homo sapiens
ttcctgccctcaactgaggacgtttacgactgcagggtggagcactggggcttggatgagcctcttctcaagcactgggagtttgatgctcca

SEQ ID NO: 357 - DNA, 177 bp, Homo sapiens
tggaaggagtggctgctctccaaactatgccaaggcggcggcagagctggtcttctggtctccttggagaaaggttctgttgccctgatttatgaactctataatagagtatataggttttgtaccttttttacaggaaggtgactttctgtaacaatgcgatgtatattaaacttt

SEQ ID NO: 358 - DNA, 239 bp, Homo sapiens
cttgtctcctccccgtgtccccaatgtcttcagtggggggccccctcttgggtcccctcctctgccatcacctgaagacccccacgccaaacactgaatgtcacctgtgcctgccgcctcggtccaccttgcggcccgtgtttgactcaactcagctcctttaacgctaatatttccggcaaaatcccatgcttgggttttgtctttaaccttgtaacgcttgcaatcccaataaagca

SEQ ID NO: 359 - DNA, 142 bp, Homo sapiens
ggtccctgcagaagcgtggcattgtggaacaatgctgtaccagcatctgctccctctaccagctggagaactactgcaactagacgcagcccgcaggcagccccccacccgccgcctcctgcaccgagagagatggaataaa

SEQ ID NO: 360 - DNA, 296 bp, Homo sapiens
agcacactagcacacagcacacacacaaagacacagcacacacatgcacacacagcacacacacgcgaacacagcacacacgaacacagcacacacagcacacacacaaacacagcacacacatgcacacagcacatgcacacacagcacacacatgaacacagcacacagcacacacatgcacacagcacacacgcatgcacagcacacatgaacacagcacacacaaacacacagcacacacatgcacacacagcacacacactcatgcgcagcacatacatgaacacagctca

SEQ ID NO: 361 - DNA, 238 bp, Homo sapiens
agcagaatttcagccggccgtgcgcgccagggcgctccgcgctacctgcccgcgccgcccgcgctcgggttcccggggagggcgccagtgctccgcgcgcgccccagccaaggtgaatccccggcagcgccttccttccgctgcccgggaagcttgagctcaacaattagcccttgatcctcgggggattccaatccacggaacaacttccctgctttccccgaactcggacatttta

SEQ ID NO: 362 - DNA, 198 bp, Homo sapiens
tgctttccccaaatgtactgatcacactccaggctcccccaaaatctagacagtgctttcttccatctctgaagggtgttaaaacctttccctgaagccacagtaattatgaaggttattttttccccggctgctgccagcgtccaggccactaacttatattcttaagatgtgaaaattaatctcagcttcccctaa

SEQ ID NO: 363 - DNA, 209 bp, Homo sapiens
aacaacccagactggctcctcactcccttttccatcactaaaaatcacagagcagtcagagggacccagtaagaccaaaggaggggaggacagagcatgaaaaccaaaatccatgcaaatgaaatgtaattggcacgaccctcacccccaaatcttacatctcaattcccatcctaaaaagcactcatactttatgcatccccgcagct

SEQ ID NO: 364 - DNA, 150 bp, Homo sapiens
agggacccagtaagaccaaaggaggggaggacagagcatgaaaaccaaaatccatgcaaatgaaatgtaattggcacgaccctcacccccaaatcttacatctcaattcccatcctaaaaagcactcatactttatgcatccccgcagct

SEQ ID NO: 365 - DNA, 295 bp, Homo sapiens
ggcaagttcttccaatatgacacctggaagcagtccacccagcgcctgcgcaggggcctgcctgccctcctgcgtgcccgccggggtcacgtgctcgccaaggagctcgaggcgttcagggaggccaaacgtcaccgtcccctgattgctctacccacccaagaccccgcccacgggggcgcccccccagagatggccagcaatcggaagtgagcaaaactgccgcaagtctgcagcccggcgccaccatcctgcagcctcctcctgaccacggacgtttccatcaggttccatc

SEQ ID NO: 366 - DNA, 183 bp, Homo sapiens
catcaggttccatcccgaaaatctctcggttccacgtccccctggggcttctcctgacccagtccccgtgccccgcctccccgaaacaggctactctcctcggccccctccatcgggctgaggaagcacagcagcatcttcaaacatgtacaaaatcgattggctttaaacacccttcacata

SEQ ID NO: 367 - DNA, 170 bp, Homo sapiens
tttgctttccccaaatgtactgatcacactccaggctcccccaaaatctagacagtgctttcttccatctctgaagggtgttaaaacctttccctgaagccacagtaattatgaaggttattttttccccggctgctgccagcgtccaggccactaacttatattcttaa

SEQ ID NO: 368 - DNA, 262 bp, Homo sapiens
tggctggtatggctctgaggctccctggggcctgctcaagctcctcctgctccttgctgttttctgatgatttgggggcttgggagtccctttgtcctcatctgagactgaaatgtggggatccaggatggccttccttcctcttacccttcctccctcagcctgcaacctctatcctggaacctgtcctccctttctccccaactatgcatctgttgtctgctcctctgcaaaggccagccagcttgggagcagcagagaa

SEQ ID NO: 369 - DNA, 165 bp, Homo sapiens
ctcagggagcgaacgtggatgaaaaccacagggattccggacgccagaccccattttatacttcacttttctctacagtgttgttttgttgttgttggtttttattttttatactttggccataccacagagctagattgcccaggtctgggctgaataaaacaa

SEQ ID NO: 370 - DNA, 191 bp, Homo sapiens
ctttttaatgttagtgatccacctgcctcagcctcccaaagtgctgggattacaggcttgaaagtctaacttttttttacttatatatttgatacatataattcttttggctttgaaacttgcaactttgagaacaaaacagtcctttaaattttgcactgctcaattctgtttttcgtttgcattgtctt

SEQ ID NO: 371 - DNA, 220 bp, Homo sapiens
gcctgtggccacctctggggcacaatgggggctccccactgcccagtctgcccctcgggttgggggagtatcccaggcctctctgtgggacctgggcccctgacgggccttttcagcccgttttgaggacagacagtcccccgaggtaggctacatccccccaccccagctggtctgcttggatttcctacagcccccgtgggcatggaccacctttatt

SEQ ID NO: 372 - DNA, 92 bp, Homo sapiens
ggacagacagtcccccgaggtaggctacatccccccaccccagctggtctgcttggatttcctacagcccccgtgggcatggaccaccttta

SEQ ID NO: 373 - DNA, 203 bp, Homo sapiens
ggtaaaaatccaaattgtatcacagaaaatacagtgaataaaaccatcctcttaagagggtgtgtacatttataaatttgcctatgattgcctataaagtcaaagaagttgcaccagtatgcatgactgccaaaagtacataaactgagcatatccatttccctacattcttgcaaacattgtgccttcgaactttttggcct

SEQ ID NO: 374 - DNA, 294 bp, Homo sapiens
cagggttcctttgcctgctaacaagcccacgtggaccagtttgaatgtctttcctttacacctatgtttttaagtagtcaaacttcaagaaacaatttaaacaagtttttgttgcatatgtgtttgtgaacttgtatttgtatttagtaggcttctatattgcatttaacttgtttttgtaactcctgatttttccttttcggatactattgatgaataaagaaattaaagtgatagttttattggtttcctttcccccaattaaggccaaataaagtcgtgagaacattaccc

SEQ ID NO: 375 - DNA, 106 bp, Homo sapiens
atgtgtttgtgaacttgtatttgtatttagtaggcttctatattgcatttaacttgtttttgtaactcctgattcttccttttcggatactattgatgaataaaga

SEQ ID NO: 376 - DNA, 114 bp, Homo sapiens
aggaggcacagaccagtgtctggatcccagcatcttctccacttcagcgctgagttcagtatacacaagtgtctgctacagtcgccaaatcaccagtatttgcttatatagcaa

SEQ ID NO: 377 - DNA, 195 bp, Homo sapiens
actttctctcgccatgtagtgagtggaatataaacagtacggcatgtggcacctgaacagtcttcatgcccaggaatcccaaatgctgtttactctacagaaaggaatcacttgattttccacttcagaagccaaccgctcaacaacactggggaagaaatgaagaatcctgggtctccttgtagtcgatcaaga

SEQ ID NO: 378 - DNA, 172 bp, Homo sapiens
agcccacccattgaagtctccttgggccaccaaaggtggtggccatggtaccggggacttgggagagtgagacccagtggagggagcaagaggagagggatgtcgggggggtggggcacggggtaggggaaatggggtgaacggtgctggcagttcggctagatttctgtct

SEQ ID NO: 379 - DNA, 157 bp, Homo sapiens; identical to SEQ ID NO: 25

SEQ ID NO: 380 - DNA, 36 bp, Homo sapiens
tgggggggcagaggcgtctgaccccaggaacctgca

SEQ ID NO: 381 - DNA, 299 bp, Homo sapiens
gcctgtggatcccttttcagtataacgcttttattttagtttttagagagacgaggtcttgctctgttgcccaggctgggtgcagcggtgcgatcttgggtcactgcagcctccaactccttggctcaagctgtcctctggcctcagcctcctgagtagctgggaccacaggcgagtgtcaccatgctgggcagtataaagttttaaatgcataaaataaaatccacaagatgaccaaggaaggcaattatgttgaaatacagatcaaaatattaaaaaaacacacatcttatgctctt

SEQ ID NO: 382 - DNA, 245 bp, Homo sapiens
gatgtgccttaaattataccaaagattactaattattcctctttgcccaaaatacttgcatccaaggttctagtctctgttgctgtgctggtctttagccccactgctggcactgatgtccctcctttttcacggagacctatctgaggtacaggatggggctggcaccagatgatgtcccaccacagtccctcacctccggcctccacatgacagaaccaatttacactcaaccatgacctcac

SEQ ID NO: 383 - DNA, 252 bp, Homo sapiens
gattcgaggaccatgtaggtcttttacgtagcccaaatccataaattagtctcactttttgtatttatcgtttcatattaaaccctctatatcaaatgttcatcatgattttgtatgatttttataactattttattcattttattagatttattttaaaattttttaatggtaaatttttaaactgtggaaaccactgaaggtgcttattaactgttttcccagatttgtacaagtattggatgattcctt

SEQ ID NO: 384 - DNA, 247 bp, Homo sapiens
atttatactaatggttcatatcctttattgctcaatgatctaattaaagggatcattgccacatttcatgtttatatttctacaatttgtttagaaaacatctcctgaccatatcagtagctcgtgttatctttttatcaactgcttcccagagtcctaaaacaatagaaattttggattgaaaagttcagcataaggagtttgagtcagtaaaggatgggataaaggagtcgagatgattcaatga

SEQ ID NO: 385 - DNA, 202 bp, Homo sapiens
tttatttattggtctgaaaggcatttcaaaggtattataataatatattggtgtaatttaattggtgcaacatgctttatggctcctgtcaaaattggttttcactcatttgattggtttgagcccagaacagcctacaggggaaaaacaagctggataaccacccaaagtgtttgtattttcgttggaaactgatttttgt

SEQ ID NO: 386 - DNA, 300 bp, Homo sapiens
cttagtttacacatctgccaaaggggtagaattacacttctttttacaggtaaatgtcaaggcacaatcagttttcaggaagtgcttcaagaccccaggtgaaatgaaaatgctaagtaccctctgaatggccatgcctgttaccaggtgctgcttcttcagatgatggggagcacttttcagggtgaaattcaggcgagttttgcccaggcctgctgtcttgagtacaaatgtgaatgatcgactgactgcttgttgccaaactggaaatgttctgtagggatttactggcatggtatc

SEQ ID NO: 387 - DNA, 167 bp, Homo sapiens
ctgaacaggagttgggataatggccatcttttctttcctatcctttcttcccccctcactgtgaaaaataacagtccaccccaagtcatacactggacccagtgcctgcggggacaggactgtgggtttcttggtcacacctgtgttggtgctcaatgcagtgtaga

SEQ ID NO: 388 - DNA, 271 bp, Homo sapiens
gactgtgctctcttaaaaataagaaagagcctcttcatcttcaaaaggactacatctgaagtttccccagaaggacaaatgtctacttagaccttataaatttccaaaataagagagtcagagccagaggtggcttgtaagttgacttctgttgagatctgaccacatttgatctcttgttttaattttccaactaactgaacttggaagaaaacccaaaccaagttttaatctgatgcctaatcagcccgtctccaaccatcagagaaaa

SEQ ID NO: 389 - DNA, 234 bp, Homo sapiens
ctccacttccctcagatgatgaggagccagggctaagggggcagccttctctcttcccagtgatgcacatccttcacattggctgctttgttctggaatatggatatctcagcctggatgccgaggaagctgctggatgcttaatggtgctagaggctcaagtgtgtttgaaaccaagagccagttgtcccccatgcagaaagaaatcctgtgtgagcctctggtatgagaaat

SEQ ID NO: 390 - DNA, 261 bp, Homo sapiens
gggagaagatgacccgtggaacacttgcctggcccactcagaatccacggtgacctttccgcttgccaaaataaccgaaggaaagaccgttcaccagacttggctcctttaaacatttgctgttcaaacatgtttttgaatatacattctataaaagattatttgaaagacaaaattcatagaaaatggagcaaaactgtataaactgatttgtaactaacactggaccattggatcgatattatatgctgtaaccatgtg

SEQ ID NO: 391 - DNA, 92 bp, Homo sapiens
ctcaaaaaagtggttttgaccagagaggcccagatggaggctgttcattccctgcagtgtcggcattgtaaataaagcctgagcacttgctg

SEQ ID NO: 392 - DNA, 238 bp, Homo sapiens
gagcaggagcctctacacagcctctggctcttaggtcccagtcatgtttgcaccccctcaaaggggcaggaccagcccttcctttcagtgtccataccaggggccttccatgtgctgatgggtgatgtgactgtggtcagcaggcttgggaagtgctgctgctgtagcttgagttgggctggggtcttggtaggacgctgatctcagaagtccccaaagttcactgtgtaggtctcta

SEQ ID NO: 393 - DNA, 128 bp, Homo sapiens
gaccagacagtgctgttggtgactgtccctgacttcagtgccacgcagaccgcctgccttgtgaacctgcgcagcctggcctgccagcccatcagcttctcgggcttcggggcagaggacgatgacct

SEQ ID NO: 394 - DNA, 152 bp, Homo sapiens
gccatttaagttaatgccgggcctggtacacttttaagagtgaaaaggggcaggacaaatgcaaagctcaatggggctcttgggcaatacggataaaccagggctgttttgagtaaatcaaatgaggatacacagtcactgtgagaaccagt

SEQ ID NO: 395 - DNA, 270 bp, Homo sapiens
taaactctctagggccaaaacctggtatggtcattgggaaatgagtgctcagggagatggagcttaggggaggtgggtgcttccctcctagatgtcagcatacactctttcttcttttgtcccaggtctaaaacatctttcctagagaaaacaaaagggactaaactagaaatataaagagccctatacatgacaggtgatcacgtactgaatgattttgaagtagtacaaacaataaaaattctcattccgcatcatcatgcggtccat

SEQ ID NO: 396 - DNA, 216 bp, Homo sapiens
aatgctgactcgacagccttttgccattggtggctccggcagcacctttatctatggttatgtggatgcagcatataagccaggcatgtctcccgaggagtgcaggcgcttcaccacagacgctattgctctggccatgagccgggatggctcaagcgggggtgtcatttacctggtcactattacagctgccggtgtggaccatcgagtcatctt

SEQ ID NO: 397 - DNA, 214 bp, Homo sapiens
tatcggtatcttagaaactatctatattctaggccaggagcagtggctcatgcctgtaatcccaacattttgggaggtcaaggtgggcagatccctagagcccaggagtttgagaccagcctgggcaacatggcaaaaccccgtctctacaaaaaatttagctggatggggtgcacctgtaatcccaactagtcagaaggctagacgggaggat

SEQ ID NO: 398 - DNA, 45 bp, Homo sapiens
gaggtggaaagatcatctgagccggggagatcaaggctgtagtga

SEQ ID NO: 399 - DNA, 242 bp, Homo sapiens
  misc_feature (26)..(26): n is a, c, g, or t
  misc_feature (199)..(199): n is a, c, g, or t
gagatgaaactatgggccccagactntactgcagcagctgtgatttcctccatagttggcttctgggtcaggcactaggcaatattttcttgaagacttcttccaaatacctgtggctcttgtcccactgcagccaccagcctgtgcaggtagcggtgctcatattggggaaggggcttcccatccaacagcagctgtncccccggtgggctggtacagattctgcaacagggcagccactg

SEQ ID NO: 400 - DNA, 214 bp, Homo sapiens; identical to SEQ ID NO: 397

SEQ ID NO: 401 - DNA, 76 bp, Homo sapiens
ggcattggctaaatgttttataaattttatctcttaaaattcaaaccaaaaaaccccctgtattcacacctgtaat

SEQ ID NO: 402 - DNA, 224 bp, Homo sapiens
tccacacctgattagaacattcataagccacatttagaaacagatttgctttcagctgtcacttgcacacatactgcctagttgtgaaccaaatgtgaaaaaacctccttcatcccattgtgtatttgatacctgccgagggccaagggtgtgtgttgacaacgccgctcccagccggccctggttgcgtccacgtcctgaacaagagccgcttccggatggct

SEQ ID NO: 403 - DNA, 222 bp, Homo sapiens
gaatcaccagtttgatactctctgtaatcagaacagtgggcagtgcctgggtgaacgtgtctagcagccactgtgcgggatcgctgtaacaggagtggaatgtacatatttatttacttttctaactgctccaacagccaaatgccttttttatgaccattgtattcagttcattaccaaagaaatgtttgcactttgtaatgatgcctttcagttcaaata

SEQ ID NO: 404 - DNA, 279 bp, Homo sapiens
tggccacggcgcttggaatcctggttgttgctggatgctcttttgcgattaggagataccaaaaaaaagcgacagcctgaagcagccacaaaatcctgtgttagaagcagctgtgggggtcccagtggagatgagcctcccccatgcctccagcagcctgaccctcgtgccctgtctcaggcgttctctagatcctttcctctgtttccctctctcgctggcaaaagtatgatctaattgaaacaagactgaaggatcaataaacagccatctgcccct

SEQ ID NO: 405 - DNA, 106 bp, Homo sapiens
atagccctaaatgtactcttgaactttttactggaacaatgtttgatactttagtatgtaagctgtatttatgtaatatttagaacgacatgttaataaacaaagt

SEQ ID NO: 406 - DNA, 125 bp, Homo sapiens
attggaaaagaaaaggaagccaggcgtggtggctcatgcctgtggtcctagcactttgggagtccaaggcaggcagatcacgaggtcaggagatcgagaccatcctggccggcagggtaaaaccc

SEQ ID NO: 407 - DNA, 70 bp, Homo sapiens
ggaagactaagttagctacaaagaaaactaagtattataccaaaaaaacttatccgggcgtggtgacagg

SEQ ID NO: 408 - DNA, 129 bp, Homo sapiens
agctttattgtactggatatctgtatttactgagtatacctatatgggagtcccttatattactttggaataacagtttttcatatataaaaaatgttgtgaaacttactgggagtgtatgtaatatgc

SEQ ID NO: 409 - DNA, 121 bp, Homo sapiens
atataccataggctaaaactaaggctttcactctagaatgcaaagctgttttgcagctgttttcccttaaagatgtcctgttgctttagtgatatttagacccctctcagttaagaaatgc

SEQ ID NO: 410 - DNA, 265 bp, Homo sapiens
agatcactgcatccgcctatacaatctttaccaataaagactcgaggcaccgttcttgctcccgtgagctgttgcaaataatcttgaatctcgttagtgtggttggtggctgtgatatcgacaaattccagaagcccttgtttgatgggcaattgactgaggatctcttgggccctcctgcagtacgggcaggtgggcttgatgaacacaaccaccttcccaggctggattttgcagttcacaaactcttgagccatgccgatgg

SEQ ID NO: 411 - DNA, 82 bp, Homo sapiens
ttatagtataatattgggaccccataccgttagcccttgtatgtataccaacactgccaaagtaaaacattaggtcaggcat

SEQ ID NO: 412 - DNA, 253 bp, Homo sapiens
gtcctcaggtgacatttggttgtgaaaagtgatattttagttctaactacctaagtcagcagcaaagtttaaacagtacagatttaaaaattttttataaaggaatttaactcttgttaactatattatatttagctttattgtactggatatctgtatttactgagtatacctatatgggagtcccttatattactttggaataacagtttttcatatataaaaaatgttgtgaaacttactgggagtgtat

SEQ ID NO: 413 - DNA, 81 bp, Homo sapiens
gtcctcaggtgacatttggttgtgaaaagtgatattttagttctaactacctaagtcagcagcaaagtttaaacagtacag

SEQ ID NO: 414 - DNA, 237 bp, Homo sapiens
cagttccagtaattattgctgctgttggtaccagacaaaatgaagagttaccttgtacatgcccactatgtacctcagacagagggagctgtgttagtacaactgaagggatccaacttgcaaaagaactaggagcgacctatcttgaactccacagccttgatgacttttacataggaaagtattttggaggagtgttggagtattttatgattcaagccttaaatcagaagacaa

SEQ ID NO: 415 - DNA, 95 bp, Homo sapiens
tgccaaagtaaaacattaggtcaggcatggtggctcaggcctgtaatcccagcattttgggaggctgaggcaagtggataacttgaggtcatgag

SEQ ID NO: 416 - DNA, 182 bp, Homo sapiens
catggtggcttcatattaagtagtaacagaagtttgaacaattggataaatttgacttccaagacagctaaacttttcaactgcaattttaaaaactacactacactgttatagttaatctgacaaaaatgtcctcaaagagtactttattttatttaaagcatctgtttaattcaaccttt

SEQ ID NO: 417 - DNA, 208 bp, Homo sapiens
gatgaaaataggcttgccactttctcttattttaattccatggtagtcaatgaactggctgccactttaatataactgaaaattcattttgagaccaagcaggatcaagtttgtagaataaacactggtttcctagccatcctctgaaaacagtatgaaacatgaccaagtacataatggatttagtaataaatattgtcgaattgct

SEQ ID NO: 418 - DNA, 210 bp, Homo sapiens
ttagggcccagtcgagacccagatccactgaacatctgtgtctttattttgctgcttgtatttattgtagtcaaatgctttacatcagaatgatgaaaataggcttgccactttctcttattttaattccatggtagtcaatgaactggctgccactttaatataactgaaaattcattttgagaccaagcaggatcaagtttgtagaat

SEQ ID NO: 419 - DNA, 289 bp, Homo sapiens
atattgtccgggtggataagaaccaggattttgtaacagggaggcaacaagctcaaaatcagaaaaaagagatttgtcaatggaacaagaggttgaagtgctttgaagttggaggaagaggtcacaggcaaaaaagtacaggcagcctttagaaaaccaaaaggacaaaggaacagattttcccctggagtctgcagaaggaaccagccctgcctgcacatggctttagcccagtgacactgattttggacatttgaccttcagaactgcttgctcataaacttgtctt

SEQ ID NO: 420 - DNA, 285 bp, Homo sapiens
atattgtccgggtggataagaaccaggattttgtaacagggaggcaacaagctcaaaatcagaaaaaagagatttgtcaatggaacaagaggttgaagtgctttgaagttggaggaagaggtcacaggcaaaaaagtacaggcagcctttagaaaaccaaaaggacaaaggaacagattttcccctggagtctgcagaaggaaccagccctgcctgcacatggctttagcccagtgacactgattttggacatttgaccttcagaactgcttgctcataaacttg

SEQ ID NO: 421 - DNA, 185 bp, Homo sapiens
attcaaactcaagtccttggagtgtcacaaaggactaacaacgctggctgggacaaaacctacagcttctttaaatgctgaggggcccctatggagaaatggcccagtgtgtttctcatgggtgtctcctccacttccccacagaatgcaatgaactcctgattccccaggtcacctacaggata

SEQ ID NO: 422 - DNA, 65 bp, Homo sapiens
aactcaagaaatggcatcgaaaagcaagtcaaaaccgtgagatttcagaattacagccctcctcc

SEQ ID NO: 423 - DNA, 262 bp, Homo sapiens
atgacaaggcaggacatccaatgccttcgagctctgtggtctggcctgtctctccagatcagatttagagtgaggtagcagatgacataatattctctttggtgttcaatccgaagaggccaatgcttcagcacaatgtcccctagccatcacccccagcccgactccccaccaagcatcctgcatccctctgccacatcttcattcttttccattctgtcttttccccgataccttctgaccccagggatttctaatagag

SEQ ID NO: 424 - DNA, 242 bp, Homo sapiens
aggatagatggcgtggccttccaaacatacaaacataatgatttgatgccacaaagctcgcttactcagaccaaggagtgaaaaattgtcgtgcccactttatgccccagcatggagtatgtggcctcttgtcatccccgtgttactgtgtagaatttctatggtgtcctaaagggggctgcagcaggggtgtgacaacggtgggattgttggcgttgcttctttgaccttacaatatcctc

SEQ ID NO: 425 - DNA, 251 bp, Homo sapiens
ctctttaccgcgagactgatcagaagaagcaaaaggggaaagggggctagaggtccactcgcaccttttacatcagacaagaggaggactgtgccagaaatctgtgcatgaaacaccatctgctcttcatgcagggaggggtcaaccgtgtgaacgtgcagagattactcgagccttctttgccaaaaatatgcattcttcccagctgtaagggtgtgaagccaaatatgtcttttagcatgaaacaataa

SEQ ID NO: 426 - DNA, 277 bp, Homo sapiens
tgttgcccactccatattccaaaagtaggggagggccagcaccagcatcggagcacagcaccatcctcacccccatccacaagcagaccaaggcggactgttcctggcttcctaaaggcttcctaaagacaatgaggtgaattttgccacagctctgaagagatgctcgtttgcactacagatattccctgctagggatcaacagtctacaacagtgaggcactgctaactgtacaaaggcagttccattcagtaccttagatccattctgggccca

SEQ ID NO: 427 - DNA, 269 bp, Homo sapiens
agctgaactagaactatgaggggttggggggagggcttggaattatgggctatttttactgggggcaagggagggagatgacagcctgggtcacagtgcctgttttcaaatagtccctctgctcccaagatcccagccaggaaggctggggccctactgtttgtcccctctgggctggggtggggggagggaggaggttccgtcagcagctggcagtagccctcctctctggctgccccactggccacatctctggcctgctagattaa

SEQ ID NO: 428 - DNA, 171 bp, Homo sapiens
agcttgttgccaaagtctgttgagcagcactgttgccaagggtcctggtgaagtcatcccaggaggaaaccacagtctgtattctttgaagggctgctgcacattgttgaatccatcgacctttaactgcaatgggatctctaatacattttgaggtcagccacttctcca

SEQ ID NO: 429 - DNA, 246 bp, Homo sapiens
gaagctattgtccacagattgatgcttccataatggaatcagctttaattgcaaggaatgaagaaaaacaagagtggaccttcaaagctacaacattttcctcctcccctccctccccaccagccccttccccaccaagaactgttatgatgtcccaaagtgaggtggtgttgattccagtctcaatgggattttctgactttaatgtttgcaaggcatttcaccagaatacagctataaacggcc

SEQ ID NO: 430 - DNA, 276 bp, Homo sapiens
tacccatgttggtctaaatgtgcttaaaagttttccaataactgaaatgagtatcagttttaaatttaaaaatttgttacttggttactccatatttcaggtattagtggctaccatattggtcagagcagattcataggatgatttcccaggtttgaagtgtgtgtatatttctggtattataagatgtcagactggtttttggagaaatatgttgtcttaatttttacctgctttgatatgacctttctgtgtgtacgtgtgacatttctttat

SEQ ID NO: 431 - DNA, 285 bp, Homo sapiens
ccttctgtttgtgtacaagagtaatttaaaagaaaaagctatgtgaaaatagttggggttttttgtgtgttttgttttttgtggtggtgaaggaggaggcctaatgtccagaggactgtttatccctgaagtatgatatactaaaatattttttattatttgtatcaattttccttggagctcaatgtgcccttgcagttttcagactttattttaggaaaatatatttgcatgttttccccccattttcaatgtttggtgtcctggttcatcataccccacaga

SEQ ID NO: 432 - DNA, 211 bp, Homo sapiens
gaggcctgaggaaggtagtacttccacaaaagggagggacccgggccccagcctcaagctagtgggggaggcagatagcctgaatccaggggattttttgggctttttaaaatgtccattgtgagttccctgtgtttgggattccactcattttggcattcacagtgcctggaatgttttagattttcagcaatgcgtgttgaataaatga

SEQ ID NO: 433 - DNA, 98 bp, Homo sapiens
catccagaaaaaggcagactaagaatcagaagccatgtgattgatgtctgacgtgagtctgtctcaggtagattccgggtgtcagtgtggtttataat

SEQ ID NO: 434 - DNA, 62 bp, Homo sapiens
tggaccaatgatgacaactgccggcgtatgagtgttgggtgatgaataatacgtgtctagaa

SEQ ID NO: 435 - DNA, 41 bp, Homo sapiens
ggcgtatgagtcatacatgatgaatatgtgtctggaactct

SEQ ID NO: 436 - DNA, 34 bp, Homo sapiens
atgacaactgccggcgtatgagtgttgggtgatg

SEQ ID NO: 437 - DNA, 250 bp, Homo sapiens
atctagcatgcagagtgtagtgtgttgaaacggtgtatgacattgctgtatcaaagttgtaaaattaagcattatttattgaaaactatgtatttttttgtaaaaacctgatcacatagagaatatcagtggcttgtgcttgtgcttcgatctaaccagcttcttgacccacccccccttggtatgcagtgttaatgctcagggttgaaaatagtacactccaatgtctcttttgcaagagtttttcaca

SEQ ID NO: 438 - DNA, 259 bp, Homo sapiens
gcgaggacgccgacgacctgatgttcgacctgagcttgaatttctctcaaagcgcgcacagcgccagcgagcagcagctggggggcggcgcggcggccgggaacctgtccctgtcgctggtggataaggatttggattcgttcagcgagggcagcctgggctcccacttcgagttccccgactactgcacgccggagctgagcgagatgatcgcgggggactggctggaggcgaacttctccgacctggtgttcacata

SEQ ID NO: 439 - DNA, 228 bp, Homo sapiens
tgttgaaacggtgtatgacattgctgtatcaaagttgtaaaattaagcattatttattgaaaactatgtatttttttgtaaaaacctgatcacatagagaatatcagtggcttgtgcttgtgcttcgatctaaccagcttcttgacccacccccccttggtatgcagtgttaatgctcagggttgaaaatagtacactccaatgtctcttttgcaagagtttttcaca

SEQ ID NO: 440 - DNA, 247 bp, Homo sapiens
gcacggactgtcagttctctgggaagtggtcagcgcatcctgcagggcttctcctcctctgtcttttggagaaccagggctcttctcaggggctctagggactgccaggctgtttcagccaggaaggccaaaatcaagagtgagatgtagaaagttgtaaaatagaaaaagtggagttggtgaatcggttgttctttcctcacatttggatgattgtcataaggtttttagcatgttcctccttttc

SEQ ID NO: 441 - DNA, 95 bp, Homo sapiens
ctattggacagtgctcttctagatcatcataagactacagagcacttttcaaagctcatgcatgttcatcatgttagtgtcgtattttgagctgg

SEQ ID NO: 442 - DNA, 114 bp, Homo sapiens
tcatccccatggagcattgcaccacccgctttttcgagacctgtgacctggacaatgacaagtacatcgccctggatgagtgggccggctgcttcggcatcaagcagaaggata

SEQ ID NO: 443 - DNA, 170 bp, Homo sapiens
acacaaatttcagcaccattctgcctgaaatggcaccatcacaacctcagtcttgggttaggtgttgttcctgtcctgagttccttgggatggtaaacacaggcagtagcccttagtttatctagatctgaaaacccagacatcagatatcgtcaaccaagacatgggtg

SEQ ID NO: 444 - DNA, 131 bp, Homo sapiens
ggtcagaagtagaatcttttcatcatcacagaaagttctattggacagtgctcttctagatcatcataagactacagagcacttttcaaagctcatgcatgttcatcatgttagtgtcgtattttgagctg

SEQ ID NO: 445 - DNA, 153 bp, Homo sapiens
atgggatggtcggatctcacaggctgagaactcgttcacctccaagcatttcatgaaaaagctgcttcttattaatcatacaaactctcaccatgatgtgaagagtttcacaaatctttcaaaataaaaagtaatgacttagaaactgcccaa

SEQ ID NO: 446 - DNA, 222 bp, Homo sapiens
tgttttcctctaattctcctcactcccaaacaccaccttccgtccccccaatacacaaatttcagcaccattctgcctgaaatggcaccatcacaacctcagtcttgggttaggtgttgttcctgtcctgagttccttgggatggtaaacacaggcagtagcccttagtttatctagatctgaaaacccagacatcagatatcgtcaaccaagacatgggtg

SEQ ID NO: 447 - DNA, 175 bp, Homo sapiens
aaaattagcatgctgctttttgtacttggaagtgtttcaaaaaattatatgaccatatttactctttctaactttctttactccatcatggctggttgattttgtagagaaattagaacccataaccatacacaggctatcaacatgttattcaatgtgacacctaactcttttc

SEQ ID NO: 448 - DNA, 194 bp, Homo sapiens
ttccaagctcctcgtgataatgcagacttcctggagtacaaacacaggatttgtaattccttactgtaacggagtttagagccagggctgatgctttggtgtggccagcactctgaaactgagaaatgttcagaatgtacggaaagatgatcagctattttcaacataactgaaggcatatgctggcccataaa

SEQ ID NO: 449 - DNA, 166 bp, Homo sapiens
tgagtttccctagagctgtgcggccagatagctgttcctgagttgcaagcacgatggagatttggacactgtgtgcttttggtggggtggagaggtggggtggggtggggtgtggtggggtggaggctgtctgtgtccaggaaacttaattccctggtgactagag

SEQ ID NO: 450 - DNA, 225 bp, Homo sapiens
  misc_feature (119)..(119): n is a, c, g, or t
ctgtttccttctactgatggctagttaggttattggaagtcttttgctgttgctagttagtcttgtatagacattgtaatgcacatgtgcaaaaatacaagtatgatacaatcttaaangggagttgctgagtccaatatatacattacaaatattgatagatattgcaaaattgccttcatagaggctatattaatttatagttccagcagcaacatatgagtt

SEQ ID NO: 451 - DNA, 275 bp, Homo sapiens
tccacctatcccaaagtcgtatcaaagaagtggctgcagattggagcccaaagcctttggttcctcagtttccaaatggattctcactaggtgggatcatgagtttgctttggacaccccaaattctaactatttcttttgtttcttacatcctttccctcttccccagccccttcccctcatgttacacctcttgctggtttgagacgtcaatcaccactgagaaagaattaaaccagtattttgagctggcaaaattcttagcctagtacaat

SEQ ID NO: 452 - DNA, 97 bp, Homo sapiens
tccagctttgtgtttatctttccagagaagtttactgtgtattaagcaaatatgtatatctttattcttgctcagtattttcgcaaacagcagctgt

SEQ ID NO: 453 - DNA, 272 bp, Homo sapiens
tccccggacgagtgcctctggatggactgggtcacagagaagaacatcaacgggcaccaggccaagtttttcgcctgcatcaagagaagtgacggctcctgtgcgtggtaccgcggcgcggcgccccccaagcaggagtttttggacatcgaggacccataagcaggcctccaacgcccctgtggccaactgcaaaaaaagcctccaagggtttcgactggtccagctttgacatcccttcctggaaacagcatgaataaaacactcatccc

SEQ ID NO: 454 - DNA, 151 bp, Homo sapiens
tggacttgctgccgtaatttaaagctctgttgattttgtttccgtttggatttttgggggaggggagcactgtgtttatgctggaatatgaagtctgagaccttccggtgctgggaacacacaagagttgttgaaagttgacaagcagact

SEQ ID NO: 455 - DNA, 205 bp, Homo sapiens
tgagctttgagtcaaatatgggatgcagaccaggtgtggtggctcacgcctgtcatcccagcactttgggaggccaaggcgggtggattgtttgtgcccaggagttcgagactagcctggccaacttcgcaaaaccctgtttttgcaaaaaataggcgtggtggcatgtacctgtggtcccagctattcaaaaggctgagatagg

SEQ ID NO: 456 - DNA, 162 bp, Homo sapiens; identical to SEQ ID NO: 152

SEQ ID NO: 457 - DNA, 260 bp, Homo sapiens; identical to SEQ ID NO: 65

SEQ ID NO: 458 - DNA, 84 bp, Homo sapiens
  misc_feature (49)..(49): n is a, c, g, or t
  misc_feature (53)..(53): n is a, c, g, or t
tccctcaaagactgacagccatcgttctgcacggggctttctgcatgtnacgncagctaagcatagtaagaagtccagcctagg

SEQ ID NO: 459 - DNA, 217 bp, Homo sapiens
  misc_feature (29)..(29): n is a, c, g, or t
  misc_feature (68)..(68): n is a, c, g, or t
  misc_feature (177)..(177): n is a, c, g, or t
tgaaaacaagcatgagtagatcctgcttnccaatgggggccttcccgtctgcttactgcttaggtttnctgcggtgggtctgagcaatgcagaaagtttcttacaatttctctggattgaaacaagaaatagctccctcgctcctcttcataaatttctcagagaaaatctaagttnccaggaagtagccaaagaccaggagattgtggaatcaaaa

SEQ ID NO: 460 - DNA, 254 bp, Homo sapiens
tgagcttcccttggacactaactcttcccagatgatgacaatgaaattagtgcctgttttcttgcaaatttagcacttggaacatttaaagaaaggtctatgctgtcatatggggtttattgggaactatcctcctggccccaccctgccccttctttttggttttgacatcattcatttccacctgggaatttctggtgccatgccagaaagaatgaggaacctgtattcctcttcttcgtgataatataatc

SEQ ID NO: 461 - DNA, 225 bp, Homo sapiens
tagaggcttcttagattctcccagcatccgcctttccctttagccagtctgctgtcctgaaacccagaagtgatggagagaaaccaacaagagatctcgaaccctgtctagaaggaatgtatttgttgctaaatttcgtagcactgtttacagttttcctccatgttatttatgaattttatattccgtgaatgtatattgtcttgtaatgttgcataatgttca

SEQ ID NO: 462 - DNA, 257 bp, Homo sapiens; identical to SEQ ID NO: 49

SEQ ID NO: 463 - DNA, 267 bp, Homo sapiens
tcctgtaaaatacagtgcaggccaggcgcggtgactcacgcctgtaatcccagcattttgggaggccaagggtggcggatcatgaggtcaggagatcgagaccatcctggctaacacggtgaaaccccatctttactaaaaatacaaaaaattaaccaggtgtggtggcgcacatctgaagtcccagctacttgggaggctgaggcaggataatcacttaaacttgggaggtggaggttgcagtgagacgacacctcgccactgcac

SEQ ID NO: 464 - DNA, 169 bp, Homo sapiens
atccacagatatagccaagtagattgggtagaggatactatttccagaatagtgtttagctcacctagggggatatgttgtatacacatttgcatatacccacatgggggacataagctaatctttttacaggacacagaattctgttcaatgctgttaaatatgccaa

SEQ ID NO: 465 - DNA, 163 bp, Homo sapiens
gatactttcattttgcacatcatgcacatcatggtattcaggggctagagtgatttttttccagattatctaaagttggatgcccacactatgaaagaaatatttgttttatttgccttatagatatgctcaaggttactgggcttgctactatttgtaactc

SEQ ID NO: 466 - DNA, 216 bp, Homo sapiens
ccagctgtttgcgcgtttgacttttgtggcctcagcaggacaggccccgggcactgcctcacagccaaggctggactgggttggctgcagtgtggtgtttagtggataccacatcggaagtgattttttaaattggatttgaattcggctcctgttttttatttgtcatgaaacagtgtatttggggagatgctgtgggaggatgtaaatatcttg

SEQ ID NO: 467 - DNA, 204 bp, Homo sapiens
aggaggagcgccagttgcccctcgctcacagaccacacacccagccctcctgggccagcccagagggcccttcagaccccagctgtctgcgcgtctgactcttgtggcctcagcaggacaggccccgggcactgcctcacagccaaggctggactgggttggctgcagtgtggtgtttagtggataccacatcggaagtgattt

SEQ ID NO: 468 - DNA, 219 bp, Homo sapiens
ccagctgtttgcgcgtttgacttttgtggcctcagcaggacaggccccgggcactgcctcacagccaaggctggactgggttggctgcagtgtggtgtttagtggataccacatcggaagtgattttttaaattggatttgaattcggctcctgttttttatttgtcatgaaacagtgtatttggggagatgctgtgggaggatgtaaatatcttgttt

SEQ ID NO: 469 - DNA, 36 bp, Homo sapiens
caccactaaaagatcgcagtttgcctggtgcagtgg

SEQ ID NO: 470 - DNA, 138 bp, Homo sapiens
tcatgtttgctgtagtgctcatatttattgttgtttttgttttagtactcacttgtttcataatatcaagattactaaaaatgggggaaaggacttttaatctttttttcataatatctttgacacatattacagaag

SEQ ID NO: 471 - DNA, 283 bp, Homo sapiens
gatcaagaccatagtgaccaacatagtgaaaccccatctctactgaaagtacaaaaattagctgggtgtgttggcacatgcctgtagtcccagctacttgagaggctgaggcaagagaattgtttgaacccgggaggcagaggttgcagtgtggtgagatcatgccactacactccagcctggcgacagagcgagacttggtttcaaaaaaaaaaaaaaaaaaaacttcagtaagtacgtgttatttttttcaataaaattctattacagtatgtcaaaaaaa

SEQ ID NO: 472 - DNA, 265 bp, Homo sapiens
aacaaaatatttctcccctagtgagagaaagaggtcctcagagagtagcagctcacataactgggaccagaggaagaagcaacacattgtcttctccaaactccaagaatgaaaaggctctgggccgcaaaataaactcctgggaatcatcaaggagtgggcattcattcctgagcaacttgcacttgaggaatggtgaactggtcatccatgaaaaagggttttactacatctattcccaaacatactttcgatttcaggagga

SEQ ID NO: 473 - DNA, 51 bp, Homo sapiens
gactggcccactggcatttttgtaagaagagggaaatttgggccgggcgcg

SEQ ID NO: 474 - DNA, 201 bp, Homo sapiens
tattgttgatgaaaagtgctagaaatagttgttggtctaaagatgcagaatatggactctattccatctatcaagggggaatatttgagcttaaggaaaatgacagaatttttgtttctgtaacaaatgagcacttgatagacatggaccatgaagccagttttttcggggcctttttagttggctaactgacctggaaag

SEQ ID NO: 475 - DNA, 173 bp, Homo sapiens
agttaaaacgtcacaaaggtgctgcttttacagggaagcttattctgttttaaacattgaaaagttgtggtctgatcagttaatttgtatgtagcagtgtatgctctcatatacaattactgacctatgctctaaaacatgaatgctttgttacagacccaagctgtccattt

SEQ ID NO: 476 - DNA, 216 bp, Homo sapiens
aaacaaaactcacgtatcatctcaatagatacagaaaaggcttttgataaaattcaacttgacttcatgttaaaaaccctcaacaaaccaggcgtcgaaggaacatacctcaaaataataagagccatctatgacaaaaccacagccaacatcatactgaatgagcaaaagctggagcattactcttgagaagtagaacaaggcacttcagtccta

SEQ ID NO: 477 - DNA, 296 bp, Homo sapiens
aaagaaaatgtggtggcagggagtggtggctcatgtctgtaatcccagcactttgggaggctgaggcgggtggttcacctgaggtcaggagtttgagaccagcctggccaacatggcgaaactccgtctccgctaaaaatacgaaaattagccaggcgtggtggcgagcacctgtcatcccagctacttgggaggcctaggcgtgagaatcgcttgaacctggaaggtggtggttgcagtgagccgagatcctgccactgcactccagcctgggcaaccaagcgagactctgcctt

SEQ ID NO: 478 - DNA, 205 bp, Homo sapiens
aatgttgtggctgaaaaggccgttttttttgactcccacttctttgggtgcccaaatgcactatttcgtagcacttaccacctggtttatttgcatcacctccgagagactgagtcacctttgactcaagccaggtctttgaaggtagagccaggtcccttttttctgtgtctccagcttttaggccagggattgatttggagca

SEQ ID NO: 479 - DNA, 173 bp, Homo sapiens; identical to SEQ ID NO: 196

SEQ ID NO: 480 - DNA, 230 bp, Homo sapiens
atccaagacctgaaagatgttcacaaatgttgtggctgaaaaggccgttttttttgactcccacttctttgggtgcccaaatgcactatttcgtagcacttaccacctggtttatttgcatcacctccgagagactgagtcacctttgactcaagccaggtctttgaaggtagagccaggtcccttttttctgtgtctccagcttttaggccagggattgatttggagca

SEQ ID NO: 481 - DNA, 278 bp, Homo sapiens; identical to SEQ ID NO: 174

SEQ ID NO: 482 - DNA, 67 bp, Homo sapiens
gcatttttatacaccaacgacatccaagctgagagccaaatcaagaatgcaatcctattcacaattg

SEQ ID NO: 483 - DNA, 223 bp, Homo sapiens
gtgttgagtaagttggtctttcccggtgctatacttgcctcctctccacggaagaattgttcaggagatgcgcttggggtgatgacttccttaaatacacgctgtagggggtgaagagcttggaggaccaggcactttgaggaagggcagttcgtgggctggggtgggaacaggatggcgggcaatagactagggtaggccgcgatggcctgtagaaggttgc

SEQ ID NO: 484 - DNA, 236 bp, Homo sapiens
  misc_feature (159)..(159): n is a, c, g, or t
aaggacctgtgttcatagacaatctaaactgtgtttctgaagtttgtgcacatttttcttcactgtaatgttattttacagctgtttgttaaaatagtgaataatttaatgatcctaaaagtaacaggtttcgtgtgagtgtgcttgtatacgtgaganttgccttattttcaggttgttttatttaacgatggttccttggacagcattctggtgttcagcaaccaatatggaat

SEQ ID NO: 485 - DNA, 241 bp, Homo sapiens
ggacctcggatgattttggagccaaagctgggggtgttgccacaaaagtagacatgcgggcactctagagtgtcaggggctgtggggctgatgtgacggacccgcagtcactgctcaggatctccaagtgatcacccatgctgctgtatcggaaaatgtcactcacgttctgatcctgatggtcccaaaaatctgactccatcaatggtggtctggtaaggggttggtaccagctgaatcc

SEQ ID NO: 486 - DNA, 269 bp, Homo sapiens
ctgaggagggttccgcctcagcactagcactctgcacaggatgtggggctgcagcccctcctcccattgcaggccagtaggagacccccagtgtgacaataggggcacctccagacattgtcactagaccttggccctgctgctgctgcccgttggggtgggcagccattggccttagaattaagattccagagtagcttccagagcaggtgccaagcctctgaacttctcctcaggcagttctcagcaatgctggcaagtgcaaaccc

SEQ ID NO: 487 - DNA, 116 bp, Homo sapiens
agtcacatcacccatcagcacatggaaggcccctggtatggacactgaaaggaagggctggtcctgcccctttgagggggtgcaaacatgactgggacctaagagccagaggctgt

SEQ ID NO: 488 - DNA, 181 bp, Homo sapiens; identical to SEQ ID NO: 55

SEQ ID NO: 489 - DNA, 263 bp, Homo sapiens
tgtcccctgatctccaattgttctcccatactgctgtatcggaaaatgtcactcacgttctgtcctgatgtccccaaaaatctgactccatcaatggtggcctggtaggggttggtgaccagctggagcgtggagtaggcagtggccagcgggaacatgcaggggtggaggggctggctcagctgcaggaggatctcatccagcatcttaacagcctccacgctggctgcctgggttttcttggtgaggtatttggccttatc

SEQ ID NO: 490 - DNA, 263 bp, Homo sapiens; identical to SEQ ID NO: 489

SEQ ID NO: 491 - DNA, 231 bp, Homo sapiens
ggcatgtgtgtagatcaagtcggatctagtccagctcggttcattagcgatccatgtaatctgacgtcatcttgtctcgaagtctctttttttggcccaggccttgaagaatacactgtgacttaagaagccttaccacgcagtaactaaagctttaggatgactgtattcgaggagtgccgtgtgttgcatgcagctacccgtaggaagacttcgcgcatatcactaata

SEQ ID NO: 492 - DNA, 203 bp, Homo sapiens
aagctgtgcggagcgaactggcgcctccgagggacgcggctcccggggcagggcagccgtcacccctgcctcccgcccccttggctgggacgtctggggtcctgtggggcccccacaatggtcccaaacagctgcctctgccactgactgcagggacacgggcagcctggctcccaggacacgacttgtaatgaaagtttggg

SEQ ID NO: 493 - DNA, 224 bp, Homo sapiens
atggccagcgtggacgggcgtgggtgtgtccaggccctggccctccccactctgccccggagttgaccctctccggaaggcttctggaagcacagctgagtggcatgggtatctcaggctccccggctggctactgcaaggtcctctcaggaccctgcccctggccactggggtacacagcctctcagcctgcctctgtcccagttagacctcagagacacaga

SEQ ID NO: 494 - DNA, 154 bp, Homo sapiens
aagcaatgcactcctgaccaagtagattcttttaaaaattagagtgcattactttgaatcaaaaatttatttatatttcaagaataaagtactaagattgtgctcaatacacagaaaagtttcaaacctactaatccagcgacaatttgaatcg

SEQ ID NO: 495 - DNA, 218 bp, Homo sapiens
  misc_feature (51)..(51): n is a, c, g, or t
  misc_feature (73)..(73): n is a, c, g, or t
  misc_feature (129)..(129): n is a, c, g, or t
ggtccggacatgacccctcagctgatgcctgtggcttccccagccagaatnttcccagttccaggctgggctntgcagagtcctatcaaaggtggcatcctcccctctgtccactccagggtgaagatntggtgtttctggtttggaaatgcctctgcactgggtgctaataattcacttttacctttataattgtggttttgtaaggacaggtattt

SEQ ID NO: 496 - DNA, 194 bp, Homo sapiens
tagaattaatagaaggcggtttagcacggtggctcacgcctgtaatcccagcactttgggaggccaaggcgggtggatcacctgaggtcaggagttcgagaccagcctggctaacaggtgaaaagccacctctactaaaaatacaaaagaaaaaaaaaaaaagccaggcgtggtgctaggagcctgtaacccca

SEQ ID NO: 497 - DNA, 72 bp, Homo sapiens
tgcaggagcagtgtccgcagtccagtgtatagcaaatcccattaaacttgctcggcttgtcatggaaaagac

SEQ ID NO: 498 - DNA, 83 bp, Homo sapiens
ggagaactgctagaacccagttgcagtgagccgaaatcacaccactgcactccagcctgggcgacagggcaagagtcggtctc

SEQ ID NO: 499 - DNA, 199 bp, Homo sapiens
caccctgtccagtgctttgagattcttcccacctccccatcctcaccagccggatcgggcgctgtgcagtgtggtcagcatggtgaagaaagtcatttcctcggtgggcagtattcctctttatctctcattacactggaaatgttatttctgctgtatcatccgtgctcaacgttttagtctgtcaggctcaccttct

SEQ ID NO: 500 - DNA, 258 bp, Homo sapiens
gaccttccctaagccgctggaagattgtattccagatgctagcttagaggtcaagtacagtctcctcatgagacatagcctaatcaattagatctagaattggaaaaattgtcccgtctgtcacttgttttgttgccttaataagcatctgaatgtttggttgtggggcgggttttgaagcgatgagagaaatgcccgtattaggaggattacttgagccctggaggtcaaagctgaggtgagccatgattactccac

SEQ ID NO: 501 - DNA, 216 bp, Homo sapiens
tacagaacaaatagagtcttttatgtttacttctttctacatagacacagtaacagcctgatctctttcgtttccccacaaatccatatagtatttgagtgtgataatgtaaaaatcagtattcatttctaaatttaagtactgctttgagaattttgttggtaattccagttgctgctgcttcagcagaaggaagcttctccaaattaaaataaa

SEQ ID NO: 502 - DNA, 102 bp, Homo sapiens
tgaccaaggcgcagcgcagtttgcagcagctatgggggttccagagattcctggagaaaaactggtgacagagagaaacaaaaagcgcctggaaaaagagaa

SEQ ID NO: 503 - DNA, 52 bp, Homo sapiens
ctctttcgtttccccacaaatccatatagtatttgagtgtgataatgtaaaa

SEQ ID NO: 504 - DNA, 270 bp, Homo sapiens
ttatttcaacacagttggaacagttaaaaagatttaaaattttcaaaaaaacaatcattttctcttttctttctggctcagacacctcattgctttttgactgaccaaggcgcagcgcagtttgcagcagctatgggggttccagagattcctggagaaaaactggtgacagagagaaacaaaaagcgcctggaaaaagagaagcatgaaaaaggtgctcagaaaacagattgtcaaaagtaagttttacctgtggctcgcattatttgg

SEQ ID NO: 505 - DNA, 225 bp, Homo sapiens
cccaaacctgtactgtcccggaggaggttgggaggtggaggcccagcatcccgcgcagatgacaccatcaaccgccagagtcccagacaccggttttcctagaagcccctcacccccactggcccactggtggctaggtctccccttatccttctggtccagcgcaaggaggggctgcttctgaggtcggtggctgtctttccattaaagaaacaccgtgcaacg

SEQ ID NO: 506 - DNA, 219 bp, Homo sapiens
ggcccggcccccatcacatgttcccttggcctcagagctgcccctgctctcccaccacagccacccagaggcaccccatgaagcttttttctcgttcactcccaaacccaagtgtccaaagctccagtcctaggagaacagtccctgggtcagcagccaggaggcggtccataagaatggggacagtgggctctgccagggctgccgcacctgtccaga

SEQ ID NO: 507 - DNA, 263 bp, Homo sapiens
  misc_feature (181)..(181): n is a, c, g, or t
  misc_feature (184)..(189): n is a, c, g, or t
  misc_feature (191)..(193): n is a, c, g, or t
cagaggccaagtataccatgcagtgggaagatgtatctagagccactgtcctccgcaaagtatgcagaaggctagaagcgcagagtctcccaaggaggtgaactttaagtggggcttccaaaacctgccattctcatgttggaatcacgcccagtgagcaataaagaaatttagtaacaanaannnnnnannngccgcctgcatcctgagtggttcccggttgcatgtcattaatgataaaggccgttctttgtcatgtcgga

SEQ ID NO: 508 - DNA, 263 bp, Homo sapiens; identical to SEQ ID NO: 507
  misc_feature (181)..(181): n is a, c, g, or t
  misc_feature (184)..(189): n is a, c, g, or t
  misc_feature (191)..(193): n is a, c, g, or t

SEQ ID NO: 509 - DNA, 256 bp, Homo sapiens
cacagctggcttatcctatacagttgtcaatgcacacagaatacaacctcatgctccctgcagcaagacccctgaaagtgattcatgcttctggctggcattctgcatgtttagtgattgtcttgggaatgtttcactgctacccgcatccagcgactgcagcaccagaaaacgactaatgtaactatgcagagttgtttggacttcttcctgtgccaggtccaagtcgggggacctgaagaatcaatctgtgtga

SEQ ID NO: 510 - DNA, 299 bp, Homo sapiens
gagattttttttaagtaatgtcaaggaacagtaatttaaaaacaaagttttaacaaattttttgtttgtttaatcccaatgccctcaacttgtatttgaataactaaataggacatgttttccttggagctgtgggcattagttcagaagctctacctgcattttaattttcaaaacttaagttttattagcaaatccttttttctgtaagacttagctatgaagtggtatattttttccaaatatttttttgaaaacatttgttgttgtaactgcacaataaaagtccagttgcaaca

SEQ ID NO: 511 - DNA, 79 bp, Homo sapiens
gcctgccagatccatatcaactagaagtctgatttctgttgctgcccttcctcagcaactatggcagtatacttttatc

SEQ ID NO: 512 - DNA, 186 bp, Homo sapiens
tacaaataactatctggatttaaaaatgtttctacgataatgtcactattataagaacaagtaggatgaaatgcattttaagttcttttatgttaacagcaatttctgtttagtgttagattttagtcttatgaagggctgaacagaggtcctgtgacacccaataatcagctgaatgtcacagca

SEQ ID NO: 513 - DNA, 129 bp, Homo sapiens
ggtgacttgtgcctgcaggccagctactcagtgggctgaggtggaaggatcacttgaacccaggaggtccaggctacagtgagtcgtgattgcatcctttactccagactgagttaacagagtaagacc

SEQ ID NO: 514 - DNA, 90 bp, Homo sapiens
aaggtgagaagcagcatgagagtgaagaaccctttatgccagaagagagatgtctacctaggatggcttctccagttaatgtcaaagagg

SEQ ID NO: 515 - DNA, 158 bp, Homo sapiens
caatgccctcaacttgtatttgaataactaaataggacatgtcttccttggagctgtgggcattagttcagaagcactacctgcatcttaattttcaaaacttaagttttattagcaaatcctcttctctgtaagacttagctatgaagtggtatatt

SEQ ID NO: 516 - DNA, 175 bp, Homo sapiens
gtcagtgtttctatgattgtaaactattaaattcttttcctattaaagtacagatctaatctaagtattattaagttgatagccctctagtcagttatattgctattgtaaattcttgtttgttgagtaaaatgtttaaatactatatgtatctcatgtacaaagttgacataca

SEQ ID NO: 517 - DNA, 243 bp, Homo sapiens
agttctgttagttaccttcttatagagatatattatgtagaactccaggagggacattaaatcactttaagtataaactgactactcccacagttgagagaagttgtgacctgtacttgtactatggaaggaaggatatcaacgtgtgtatattgatgtttatataagtaactcttgaaggagacttgttctagcgtgccccatggtacctagtgtgtgtctgatgccggttggtgtcaaaga

SEQ ID NO: 518 - DNA, 292 bp, Homo sapiens
aaacaccgatgacgcatgcactgcactttttcgtttttttcttgctcccccattggcctgagtttcttgtgcattactcctctccctccttcgttagaataggtatatcagctgtgtaaatagagcaagaaaacagtattttgcatctgtggcatttatgtagagttgcagttgtgtactgctgaaaatgcaggcttttgtaacagtgtgatctttactgatgcactcatgacaagtacccaatgtattttagctattttagtagtatttgttcaataaatacgcaagctgt

SEQ ID NO: 519 - DNA, 167 bp, Homo sapiens
tcgtaacacctccatttgtattacatatggtgtatgggtattgatgaggtcatggtatcatatatgggattttttttctgtgtaaatcatcaagtataagaagaaactatgggactctgagccttgctttagagaatttacagtggacaaataggtgtcatcaaacc

SEQ ID NO: 520 - DNA, 56 bp, Homo sapiens
atgacacaccaccattttgagtattaacctcttgatataataagggaagtccttct

SEQ ID NO: 521 - DNA, 269 bp, Homo sapiens
tttatttccatgttctaagaaggtgttggtactctgtttccctgaatgttgttctctagactggattgacttgttttccttgtgtcttcagtgtggctttcttcctcagtgttgtaggttgagcgaatgctaccagagtgtgagagaccattgtctcgttggctggcgctcacggacatgcagtcacggtagcgggagcaatcacaaaactgtaatttacttaccaaatctcttcctttccgtagcctcgcctgcctgacttagagaaa

SEQ ID NO: 522 - DNA, 82 bp, Homo sapiens
aaacacggaaggttatgtaatgcagtgccatttccaaaaatatccactctgaggcattacactacacggtggaaggctgatt

SEQ ID NO: 523 - DNA, 266 bp, Homo sapiens
attaactggcgtgactttcaggacggcggggctgtgggagccactggacacatctgccccccaacccctagcctcttgaattactcaagtccctcagctctgttggcacaaatacgtgctggatgatagaagaaccgtttttcccatggatgaactttttttggcttgaattcttacaaggcctgacttctggatctggagaaagaagacttctttgtgtcccatcttcaaaatgcctcctccacttgttgcagaagcctaaaatt

SEQ ID NO: 524 - DNA, 278 bp, Homo sapiens
aggaaatcccccagtaccttcagatgataagatattttagagatttttgcatgtggtatgatttctgtgcttcacacatgctcgtgcaggctaaaagttggaagggaaatgattaagaaattattaaatgcaaggactgaaaattgagaggaatctgagtttttatttttatttttttaattttatttaagttccaggatacatgtgcaggatgtgcaggtttgttacataggtaaacgtgtgccatggtggtttgctgcacgagtttttcaataaaa

SEQ ID NO: 525 - DNA, 188 bp, Homo sapiens
gttcttatcttgtgggctgatttccaaaaaccacatgctgctgaatttaccagggatcctcatacctcacaatgcaaaccacttactaccaggcctttttctgtgtccactggagagcttgagctcacactcaaagatcagaggacctacagagagggctctttggtttgaggaccatggcttacctt

SEQ ID NO: 526 - DNA, 271 bp, Homo sapiens
  misc_feature (90)..(91): n is a, c, g, or t
  misc_feature (99)..(100): n is a, c, g, or t
  misc_feature (116)..(116): n is a, c, g, or t
  misc_feature (122)..(122): n is a, c, g, or t
  misc_feature (131)..(131): n is a, c, g, or t
  misc_feature (133)..(133): n is a, c, g, or t
  misc_feature (143)..(143): n is a, c, g, or t
  misc_feature (145)..(145): n is a, c, g, or t
  misc_feature (156)..(156): n is a, c, g, or t
  misc_feature (185)..(185): n is a, c, g, or t
  misc_feature (213)..(213): n is a, c, g, or t
  misc_feature (227)..(227): n is a, c, g, or t
  misc_feature (231)..(231): n is a, c, g, or t
  misc_feature (244)..(244): n is a, c, g, or t
cacgcctataagcactttgggatgctgaggcaggaggattgcctgggcccaggagtttgagaccaatctgggcaacatagggacaccctnnctctaccnnaaaaaaaaaaaaaaantttaanttagccaancntggtggcacnanacctgtcctanatactcaggaggctaaggtgggaggatcncttaagcccaggaggttgaggcagctgngagccatgattgcnctgntgcacaccagccntggggacagagcgagctctgtccaaaa

SEQ ID NO: 527 - DNA, 63 bp, Homo sapiens
ctaattttgtcaagcacagctgtggtgggaagagttagggccagtgtcttgaaaatcaatcaa

SEQ ID NO: 528 - DNA, 185 bp, Homo sapiens
gcagtttgttgagtttcgggataagaaccgtgatgggaagatggacaaggaagagaccaaagactggatccttccctcagactatgatcatgcagaggcagaagccaggcacctggtctatgaatcagaccaaaacaaggatggcaagcttaccaaggaggagatcgttgacaagtatgacttat

SEQ ID NO: 529 - DNA, 95 bp, Homo sapiens
atattaaaaaagttttctggctgggcgcaatggctcatgcctgtagtcccagcactttgggaggccgaggcaggcagtttatgaggtcaagagat

SEQ ID NO: 530 - DNA, 232 bp, Homo sapiens
tgaggaacaactctaattagtacacttgtgtttgtagatttacactttgtattatgtattaacatggcgtgtttatttttgtatttttctttggttgggagtatgatatgaaggatcaagatcctcaactcacacatgtagacaaacattagctctttactctttctcaaccccttttatgattttaataattctcacttaactaattttgtaagcctgagatcaataagaa

SEQ ID NO: 531 - DNA, 270 bp, Homo sapiens
ccaggccttatgttaaaatcatgcacttgaaaagcaaaccttaatctgcaaagacagcagcaagcattatacggtcatcttgaatgatccctttgaaattttttttttgtttgtttgtttaaatcaagcctgaggctggtgaacagtagctacacacccatattgtgtgttctgtgaatgctagctctcttgaatttggatattggttattttttatagagtgtaaaccaagttttatattctgcaatgcgaacaggtacctatctgttt

SEQ ID NO: 532 - DNA, 240 bp, Homo sapiens
tgtacagccatgatgggaatactgatgagccagaatgggtaaagacagagcgagagcagtttgttgagtttcgggataagaaccgtgatgggaagatggacaaggaagagaccaaagactggatccttccctcagactatgatcatgcagaggcagaagccaggcacctggtctatgaatcagaccaaaacaaggatggcaagcttaccaaggaggagatcgttgacaagtatgacttat

SEQ ID NO: 533 - DNA, 277 bp, Homo sapiens
ggtgaatctttccagagcagctgaaaatctcagcatggagacagtaagaaaagagacggggtgtggataagactttgccaccgtgtcacactagcataggaggctgcacgttcatttgttgttgtttttttttcctttgccaacctccgttctatttatgtgcaagcagtttggattcaagttcttgtatctgtctgttctgggacctggggattgtgagggttccctcacagccagcacgacccccagaaagaggcgtcccacaataaacacgtca

SEQ ID NO: 534 - DNA, 87 bp, Homo sapiens
aaggacaccattttggcaagctctatcaccaaggagccaaacatcctacaagacacagtgaccatactaattataccccctgcaaag

SEQ ID NO: 535 - DNA, 220 bp, Homo sapiens
taaatttggaattctagtgcacattcaaagttaagctattaaatatagggtgatcatagttcctctaccaagtctggaaagaacatctcctggtatccacaattacaccaggttgctaactgtatttgtacatttccctttgcattcgcttttgttcttgctagaaacccagtgtagcccagggcagatgtcaataaatgcatactctgtatttcgaaaa

SEQ ID NO: 536 - DNA, 225 bp, Homo sapiens
caataaagcccctttgtgaaactgttctttaaatgaaacacaagaaattggccactggtaaaactttgcagcttcaactgtacttcatttaatgccattaatgcaaatatacttccttttctttttgcatggttttgcccacctttgcaatagtgataatttgatgctgaagatcaaataaccaatataaagcatattttttggccttgctccacaggacatagg

SEQ ID NO: 537 - DNA, 294 bp, Homo sapiens
gcttccctagatgtcactggacaggtgccccccaatcctactaaggtctctggagctcctctcttcacccctggaaaaacaaatgatctgttaacaaaggactgcccacctccggaacttctgacctctgtttcctccgtcctgataagacgtccaccccccagggccaggtcccagctatgtagacccccgcccccacctccaacactgcacccttttgccctgcccccctcgtctcaccccctttacactcacatttttatcaaataaagcatgttttagaaagtgcaaaaa

SEQ ID NO: 538 - DNA, 286 bp, Homo sapiens
tagatgtcactggacagctgccccccatcctactcaggtctctggagctcctctcttcacccctggaaaaacaaatgatctgttaacaaaggactgcccacctccggaacttctgacctctgtttcctccgtcctgataagacgtccaccccccagggccaggtcccagctatgtagacccccgcccccacctccaacactgcacccttctgccctgcccccctcgtctcaccccctttacactcacatttttatcaaataaagcatgttttgttagtgcaaaaaa

SEQ ID NO: 539 - DNA, 270 bp, Homo sapiens
ggctgggcttccctagatgtcactggacagctgccccccatcctactcaggtctctggagctcctctcttcacccctggaaaaacaaatgatctgttaacaaaggactgcccacctccggaacttctgacctctgtttcctccgtcctgataagacgtccaccccccagggccaggtcccagctatgtagacccccgcccccacctccaacactgcacccttctgccctgcccccctcgtctcaccccctttacactcacatttttatca

SEQ ID NO: 540 - DNA, 282 bp, Homo sapiens
atctcaggggtcctgacgctaatccccgtgtgctggacggcgcatgccgtcatccgggacttctataaccccctggtggctgaggcccaaaagcgggagctgggggcctccctctacttgggctgggcggcctcaggccttttgttgctgggtggggggttgctgtgctgcacttgcccctcgggggggtcccagggccccagccattacatggcccgctactcaacatctgcccctgccatctctcgggggccctctgagtaccctaccaagaattacgtc

SEQ ID NO: 541 - DNA, 145 bp, Homo sapiens
gagtgcaccggcaccatctcggaaacttggactggaaaggagatcacagatggggaagagaaaacagaaggggaggaagagcaggaggaggaggaggaagaggaggaagaggaagggggagacaagatgaccaagacaggaagcc

SEQ ID NO: 542 - DNA, 249 bp, Homo sapiens
gggaagtcacttagctccttaaggtctgtttttagacccttccaaggaagaggccagaacggacattttttgcgatctatatacattgcctgtatccaggaggctacacaccagcaaaccgtgaaggagaatgggacactgggtcatggcctggagttgctgataatttaggtgggatagatacttggtctacttaagctcaatgtaacccagagcccaccatatagttttataggtgctcaattttct

SEQ ID NO: 543 - DNA, 94 bp, Homo sapiens; identical to SEQ ID NO: 142

SEQ ID NO: 544 - DNA, 129 bp, Homo sapiens; identical to SEQ ID NO: 113

SEQ ID NO: 545 - DNA, 130 bp, Homo sapiens
ccccaacccggaaacagacaagcaacccaaactgaacccccccaaaagccaaaaaatgggagacaatttcacatggactttggaaaatatttttttcctttgcattcatctctcaaacttagtttttatc

SEQ ID NO: 546 - DNA, 203 bp, Homo sapiens
tcctagtctgtcctgcgtcctctgtccccgggtttcagagacaacttcccaaagcacaaagcagtttttccccctaggggtgggaggaagcaaaagactctgtacctattttgtatgtgtataataatttgagatgtttttaattattttgattgctggaataaagcatgtggaaatgacccaaacatccctaactttcttgt

SEQ ID NO: 547 - DNA, 126 bp, Homo sapiens
aaatgggggacaatttcccatggactttggaaaatttttttttcctttgcatttttttttcaaacttagtttttttttttgaccaaccgaacatgaccaaaaaccaaaagtgcattcaacctttcc

SEQ ID NO: 548 - DNA, 145 bp, Homo sapiens
agctgtggggaaggcactcgcaccgtgctcttgggaaggaaggagacctggccctgctcaccacggactgggtgcctcgacctcctgaatccccagaacacaacccccctgggctggggtggtctggggaaccatcgtgcccccg

SEQ ID NO: 549 - DNA, 53 bp, Homo sapiens; identical to SEQ ID NO: 31

SEQ ID NO: 550 - DNA, 189 bp, Homo sapiens
cctctggcttctcaggcctctgctctccgacctctctcctctgaaaccctcctccacagctgcagcccatcctcccggctccctcctagtctgtcctgcgtcctctgtccccgggtttcagagacaacttcccaaagcacaaagcagtttttccccctaggggtgggaggaagcaaaagactctgtacc

SEQ ID NO: 551 - DNA, 228 bp, Homo sapiens
cactgcaccgcctcagggttttggggtcctgggctggggccaccatccctgatggcagaactcccacaaccacatgtatttattcctctgtcctaaaccgtcccctccttccctcacccccagcacagggggattttgagcagtgcctcttgtttgagggacatatcagtgacctcgacgttgcctttagactacagttgtgttagcctcttgcgtattggctttttc

SEQ ID NO: 552 - DNA, 136 bp, Homo sapiens
aaaccagctgaaaccacgcaaccccagtcaccccaatgcaccgcgaggctgctgcctcctgtcagggtcagatgagcctcgaggctcaggaaagtcagaggatgccatctgcatggtggtaaattacagaggtgat

SEQ ID NO: 553 - DNA, 141 bp, Homo sapiens
aagatggtttctatctcatgacccccactccctgtgagagggaatgggggaagcctgatgaccctcagctgttccaatctagtattttttttcttttttaaaattactgtatttattatgacgatggtgactccccagtgc

SEQ ID NO: 554 - DNA, 62 bp, Homo sapiens
ataaagtataattaggtcactatggaaacagagttttcagtaatgagtggacagtaagtggt

SEQ ID NO: 555 - DNA, 38 bp, Homo sapiens
tttcgcatatatgtaaaatgttctcagccgggcacggt

SEQ ID NO: 556 - DNA, 178 bp, Homo sapiens
cctttttgatacgaagatgtgctttttctagatggaaaagatgtgtgttattttttggatttgtaaaaatatttttcatgatatctgtaaagcttgagtattttgtgatgttcgttttttataatttaaattttggtaaatatgtacaaaggcacttcgggtctatgtgactatattt

SEQ ID NO: 557 - DNA, 189 bp, Homo sapiens
aaaagattcatgtgtaaagcttttttttgcatgtaagttattgcatttcaaaagacccccccctttttttacagaggactttttttgcgcaactgtggacactttcaatggtgccttgaaatttatgacctcaacttttcaaaagacttttttcaatgttattttagccatgtaaataagtgtagatag

SEQ ID NO: 558 - DNA, 107 bp, Homo sapiens
tggattctggatgggagattgcactgtgtgtgacatgcaagtttcatggtgtgggagattgcagagcatttgggttactgcttttactctttggaagctgttatcat

SEQ ID NO: 559 - DNA, 249 bp, Homo sapiens
ctagctcacttccaggtttaacagacaaaataaacttactctagtttccatctctatcattttataataaccgtagcccacattgtagtagtttttcagctctttactaagtcccaccaattcatgttttcacccttaaaatctttctcactgatactctctctggacagaaaaaaggtgaaataagcctactataaggaatatatgacatgctaaattttatttttaaacggttcttcaagtcagatt

SEQ ID NO: 560 - DNA, 193 bp, Homo sapiens
agtttaattcctggtttgagggacacctctaacatctcggccccctgtgcccccccagccccttcactcctcccggctgctgtcctcgtctccacttttaggattccttaggattcccactgccccacttcctgccctcccgtttggccatgggtgcccccctctgtctcagtgtccctggatcctttttcct

SEQ ID NO: 561 - DNA, 202 bp, Homo sapiens
caaagctgttgttgggcaccaggttggccacctcaatcaccagccaagatggttgctttgtccaccagaggtcaagttcacctctttggtgctgtagttcccagctccttcctgatttttttaatcgctccttttggggaacaggaagttgatattgccatggtggcggggtatgccgtcacctcagtagttttactgtaaa

SEQ ID NO: 562 - DNA, 247 bp, Homo sapiens
gtacaagccttcacaagtttaactaaattgggattaatctttctgtagttatctgcataattcttgtttttctttccatctgtcctgggttgacaatttgtggaaacaactctattgctactatttaaaaaaaatcagaaatctttccctttaagctatgttaaattcaaactattcctgctattcctgttttgtcaaagaattatatttttcaaaatatgtttatttgtttgatgggtcccaggaa

SEQ ID NO: 563 - DNA, 180 bp, Homo sapiens
gcctgctatgtgcacggcatgggcccatatgtgtgaggagcttgtctaattatgtaggaagcaatagatctcggtagttacgtattgggcagatacttactgtatgaatgaaagaacatcacagtaatcacaatatcagagctgaattatcctcagtgtagcttcttggaattcagtttc

SEQ ID NO: 564 - DNA, 82 bp, Homo sapiens
aatgaagacatgtatccataagaaggagtgctcttcatcaactaatagagcacctaccacagtgtcatacctggtagaggtg

SEQ ID NO: 565 - DNA, 80 bp, Homo sapiens
tttggattatctgtttactgtctcatctgaactgatcccaggtgaacggtttattgcctagatttgtactcagaggaatt

SEQ ID NO: 566 - DNA, 166 bp, Homo sapiens
atgaacattttactgtgagactctttattttgccttctacttgcgctgaaatgaaaccaaaacaggccgttgggttcacaagtcaatatatgttggatgaggattctgttgccttattggggactgtgagacttatctggtatgagaagccagtaataaacctttg

SEQ ID NO: 567 - DNA, 292 bp, Homo sapiens
tgacttggtaagacttaagtaaggctctggctcccaggggcataagcaacagtttcttgaatgtgccatctgagaagggagacccaggttatgagttttcctttgaacacattggtcttttctcaaagttcctgccttgctagactgttagctctttgaggacagggactatgtcttatcaatcactattattttcctgttacctagcatgggacaagtacactacacatatttgttcaatgaatgaatgaatgtcttctaaaagactcctctgattgggagaccatatcta

SEQ ID NO: 568 - DNA, 177 bp, Homo sapiens
gccaattctctcactgtggttccttctctgactttgcctgttcatcatctaaggaggctagatccttcgctgacttcaccattcctcaaacctgtaagtttctcacttcttccaaattggctttggctctttctgcaacctttccattcaagagcaatctttgctaaggagtaagtg

SEQ ID NO: 569 - DNA, 147 bp, Homo sapiens
agctgccaatactttggacacaaaccaaaacacacaccaaataatcagaaacaaagaactcctggacgtaaatatttcaaagactacttttctctgatatttatgtaccatgaggggaaaaagaaactacttctaacgggaagaaga

SEQ ID NO: 570 - DNA, 271 bp, Homo sapiens
gacaggattctttgtcagggacaagaaagagtggtctcacctccaaattaccatgtcccaagacagagaaatggaaggaagatgaaaggacaggattgaagcatagggtacctggtgtgcctaatcccttataaatgccagtgtaatttaattctttccttatggtgataattttcaagaagacaaaagctggctaggaattcgtagaatacttactatccttggaaaatgttttctttcctttgcaaacagtccagtcacttgcttgtta

SEQ ID NO: 571 - DNA, 271 bp, Homo sapiens
cacacacggctagatcatttagttttctttctgagaagaatttttatttcccaggtccgcctccatcatctcctctttggtaatagtcgcagaggttgccataatgagtcatttgttaaactaatctgtgtttccatagtccactgtggccctctgtattgagcttgggccactcaatggcgcctttgtcaggctgattaaaatgtaactttgcatgccaaaaaagggcactcctctggcttaaaagtcatcttcctttgttataaatgtt

SEQ ID NO: 572 - DNA, 93 bp, Homo sapiens
gcatgaaagagcaccattcttaaaatctaaaccctttaaaatcagttacggcaattcacttaaggagcttgagggccgtgttaaaaggagcca

SEQ ID NO: 573 - DNA, 184 bp, Homo sapiens
tgtataaaatgaaaccttggctgggtgtggtggctcacacctgtaattccagcactttgggaggtcgaggcgggtgggtcacttgaggtaaggagtttgagaccggcctggccaacatggcgaaacctcatctttactaaaaatacagaaactagctgggcttgtatgagagcgcctgtaatcc

SEQ ID NO: 574 - DNA, 186 bp, Homo sapiens
catcatatagtacagctaacccttgaacagtgggggggttagggacactgacccccgactgctgtgcagtcgaaaatccacataaaacttttgactccttcaaaacttaagcactaatagcctactattcatgggaagccttacccatcacagttgattaacacgttttgtatggtctgtatatta

SEQ ID NO: 575 - DNA, 151 bp, Homo sapiens
aaatcgcaatatctacccagctatctataagggttgcgttgacagcattatgcttctggccaaacagagagaacaagaaacgtgcaatgttcccttcgccttcgatggggcacatcgtctggatgctgaatttcatctgcgtcttcggcac

SEQ ID NO: 576 - DNA, 258 bp, Homo sapiens
tccaccttcagtttagcgtcattccaaaaccacacccttgcaaagctttgtactccgcaccccagatgatctccaggcagctcagatctctttcctgcctttgccctgcactgttccccggtacttcctcctttattgtagcactcagctccccagccaatctgtacatccctcagaggcagcgatctgatgaattggtttttgaatcccagaaagggtctgccatggagttggcagtcatcacggtagatggcgtat

SEQ ID NO: 577 - DNA, 272 bp, Homo sapiens
  misc_feature (126)..(126): n is a, c, g, or t
  misc_feature (175)..(175): n is a, c, g, or t
  misc_feature (195)..(195): n is a, c, g, or t
  misc_feature (236)..(236): n is a, c, g, or t
ttctctgttgagtggttcattttgaagttccacagattgaagagaacatgccaccaatcacctcacatcttcttggtggacatgataaatgacacaatgaacttgatttctttactaccttgctgnagctttttatccctacctgtgaaccttcaaagactgcattaacttttangctacataggtccaattgangtataatatcagtacaccaaagattttaatatggccctcgngtgaccattcttcaacggcctaagggccactgcaaa

SEQ ID NO: 578 - DNA, 280 bp, Homo sapiens
tacattctatgctgactgttaaggaaagagcacccacatctgctcctacttagctttttttctgtggttcttacacagtattcctttttttcttttcttgaaagagactcctcctttcttttcttttcttgaaagagttttaaacagataagatggcaaaagtgactgatctctactcccccagtttgaatggtaaatttgaatggtaaattcccatgaacatatatggaaatgtctttatcctactttctccaataaaggctgttcttagcttttcaaa

SEQ ID NO: 579 - DNA, 265 bp, Homo sapiens
gtgactatctttatgagaattttaaagtggttctggatatcttttaacttggagtttcatttcttttcattgtaatcaaaaaaaaaattaacagaagccaaaatacttctgagaccttgtttcaatctttgctgtatatcccctcaaaatccaagttattaatcttatgtgttttctttttaattttttgattggatttctttagatttaatggttcaaatgagttcaactttgagggacgatctttgaatatacttacctatta

SEQ ID NO: 580 - DNA, 228 bp, Homo sapiens
ttctttgcgctatggtaggtgtttacccatcataggaatgggcatttgaactttgaaactgaatgtggtgattacacttcatgctgaagcttttcacatgagtgctttcataagcattaagtaaaattttataatgactgcagtccaaggacattttccctggtttttggccagtctaaatattgtaagagagagagaagaaaagtgtacggaatataattgtctcta

SEQ ID NO: 581 - DNA, 286 bp, Homo sapiens
ctgaattaccccacaagattttcccttatttatataaagtgaagattacttaactcagtttaggatactattaaatttgctttgaaatatttgcattaaaattttcaatagtttttcatgagcaggtcaataagatatttataaattatagtttgcagaatttaatttgtatgaatcaaatgcccagagcttaagattgattattccctcttcagtgttgcctagagcagtgggtaatagcattaacaataaaagcaaagaagtctgattagatacgatggttttt

SEQ ID NO: 582 - DNA, 274 bp, Homo sapiens
atgataaacttagccgttcactccgctattactatgagaaaggaattatgcaaaaggtggctggagagagatatgtctacaagtttgtgtgtgatccagaagcccttttctccatggcctttccagataatcagcgtccactgctgaagacagacatggaacgtcacatcaacgaggaggacacagtgcctctttctcactttgatgagagcatggcctacatgccggaagggggctgctgcaacccccacccctacaacgaaggctacgtgta

SEQ ID NO: 583 - DNA, 269 bp, Homo sapiens
tgctggcactgatattatccatcatctctttttggacacttctgtaaatgtgattggattgtttgaaagaagatttaaagtttcaaagttttttgttctgtttttgctttgcatttggagaaaatattgaaagcagggtatgttgtttcattcaccttgaaaaaaccatgagtaaatggggatatagaatctctgaatagctcgctaaaagattcaagcaagggacatgaattttgttccatctatcaataatatccagaagaacaact

SEQ ID NO: 584 - DNA, 96 bp, Homo sapiens
atacacaaaaaggggcttttcctgttgcattattctatggtctgccatggactgtgcactttatttgagggtgggtgggagtaatctaaacattta

SEQ ID NO: 585 - DNA, 180 bp, Homo sapiens
gttacaagtgtatataccgtggctattgtttatggattcatatgtaaggtagggtcttttttgcatatagactccagtattagttactttcattctaaaattatatttatgcttctatggggaagaaaatttttaattcacttggttgtattaaaattatacttacggtttgagaaaaca

SEQ ID NO: 586 - DNA, 295 bp, Homo sapiens
aagaattgggccatgctaacgttatcacaagagaacaatggcagaaatggtattagttatataatatttaaggacaaactatatgttttgctgttttaacgtagtgactcactgaactaaatacataattgaccaacattaagtgtatttccaatacagaagggttgaaaatattacattataaactcttttgaaaaatgtatctaaaattttttaagttctgttttgattccactttttggttgagtttttatgtttttgttttcaggtagattaataaatctggcagctgatt

SEQ ID NO: 587 - DNA, 235 bp, Homo sapiens
aaccaattaccacaacttcagtaatttacacaaatttatcttatagttctgggaggcagaagttcaaaagaagccttcaagagactaaaaccaagatgtccttaggtctggttccttctggaggctccagggagattcttccagctttcacttctagagtctgctgacattccttggtcctggctacatcacttcaatctctgttccatggtcacatactcttctactatagtca

SEQ ID NO: 588 - DNA, 262 bp, Homo sapiens
gaacatcacataccgtggcctattatggcattgggggaaaggggagcaagagcattaggacaaatacttaatgtatgcggggcttaaaacctaaatgatgggttgataggtgcagcaaaccaccatagcaaatgtatacctatgtaacaaacctgcacattcatcacatgcatcccagaacttaaagaaaaataaaaataattttaaaaagaaagaaaacctagtaaatacttttcttgacatgggttttggcaaataattt

SEQ ID NO: 589 - DNA, 288 bp, Homo sapiens
gaacatcacataccgtggcctattatggcattgggggaaaggggagcaagagcattaggacaaatacttaatgtatgcggggcttaaaacctaaatgatgggttgataggtgcagcaaaccaccatagcaaatgtatacctatgtaacaaacctgcacattcatcacatgcatcccagaacttaaagaaaaataaaaataattttaaaaagaaagaaaacctagtaaatacttttcttgacatgggttttggcaaataatttatggccaagttcctaatagcaattgc

SEQ ID NO: 590 - DNA, 32 bp, Homo sapiens
aagttagtgtggggattcctcaggatctagaa

SEQ ID NO: 591 - DNA, 244 bp, Homo sapiens
caatatagtactggatgtgctagccagcgcaatgaagaaagggaataaataaaaggcacccaaataaaaagagagaaaatcaaactctctctctttactgatatgattcaatacctagaaaaccctaaagactctgctaagtctcctggaactgataaatgaattcactaaaattttaatatactaaaccaatgtacaaaaatcctaacatttttatacaccaatattgttctaggtgagaatc

SEQ ID NO: 592 - DNA, 217 bp, Homo sapiens
ttttcactcatagatgggaattgtacaatgagaatacttggacacaggaaggggaacatcacacaccagggcctgttgtggggtggggggagtggggaaggatagcattaggagatatacctaatgtgaatgatgagttaatgggtgcagcacaccaacatggcacatgtatacatatgtaacaaacctgcatgttgtgcatatgtaccctaagact

SEQ ID NO: 593 - DNA, 239 bp, Homo sapiens
ctggatgtgctagccagcgcaatgaagaaagggaataaataaaaggcacccaaataaaaagagagaaaatcaaactctctctctttactgatatgattcaatacctagaaaaccctaaagactctgctaagtctcctggaactgataaatgaattcactaaaattttaatatactaaaccaatgtacaaaaatcctaacatttttatacaccaatattgttctaggtgagaatcaaatg

SEQ ID NO: 594 - DNA, 173 bp, Homo sapiens
gaggaccttctgcaaggttaatgtgtgtgtgtgtttgtgttcgtgtggtggtgtttctattaattgggtgaaaccaagcaccagcagacaagcagagaaacaactggggaatttattgactcatttagttattctttctacttttatttccttctctaactgttggtcttact

SEQ ID NO: 595 - DNA, 231 bp, Homo sapiens
ctgccactcccctggtaatgcataaaaggggaggggaaggttccctggggcttgagctccctctgtggaggtgaggaggggaaattccgttcacatccaggaggggcaaaatgactgatgtatttttatgtatctacacagagagtgcattttctctccagagatgctgtctggttaacaaaggaataacttaagaaattgattgattatcttaataaactgtgcaaaccc

SEQ ID NO: 596 - DNA, 83 bp, Homo sapiens
taaccttaggaaaccagaatagcgtttggcagacacgacgttttcagtttacctttgacacctgccccactccattttgcttt

SEQ ID NO: 597 - DNA, 252 bp, Homo sapiens
gcaggtgacagtcaactgaaatgtccccaaggaccgtgtgaattcggctggcgtggcccagcagcggggtggaccagggtgcggtggcttcagacctgcctcccgccaccccgtcctcccctaaccccttcttgggacctcctgccaatccctgtggtgtttgagtaaagaaagtggctgatggttttacttttttcttccaatattggaaagaacaaactagatattccccttgaacacatccaaattatt

SEQ ID NO: 598 - DNA, 285 bp, Homo sapiens
aaagaccaccagaattgcaggaaagcagcagcagtctgggatagggaggggggaggagagctctccctccgtggtcagtttgtcagaagaaaagcatggaaaaagtgagatttaagaaatttcagccacgggtgtcttcactgcacaaaagtggtgctaattcagtaaacagtgacacctgtgtgggttcaatctgtggagagttgagttccattcctttgtttttaaatttccacctccatttgtgtttcctattaacctaaactcttgtaattctctaaatct

SEQ ID NO: 599 - DNA, 245 bp, Homo sapiens
aaatctaattaaagccaacggcaatttgcatgatgaggagaggaagctaggctggaggcaaagaacttgctgacagtcaggcatactattaaataggttactatgggaggaagtagaagtttttaaaagtaagggggaagcgggttatcgttcttgagcagatggaatcttcttaagccgcgcagagccagaccgtgttaggtttaacccccccttttttttttcaatggatttaacctctttat

SEQ ID NO: 600 - DNA, 157 bp, Homo sapiens
tgtgttttcagagctaggtacagaggaatgtttgctacctttagcggtgaaaaaagaaagagagtcaagaattttgttggattgtgtttgtgtgtgcatatatttgatatcatcattatatttgtaatctttggacttgtaatcatagcctgtttat

SEQ ID NO: 601 - DNA, 63 bp, Homo sapiens
tgtgcatttcaaatgcactccgattatgctgtggttttattcacataagcacaatatgtgttt

SEQ ID NO: 602 - DNA, 281 bp, Homo sapiens
cccgtttagcaatgaggcagtgtagatgaatacggtaaaataaatgactttaaccaagtagctataatgggacttagcactgtatgcatacttaaaaaggttttgaaaaacaaactacttgagaaatatttgtttatatttttctctaacatcatgctatgtgtcagtctgaacatctgacaacagaaatttcagttattattctagctaagttttgaaaacatttgtcatgctgtttaatagaaaactgcaaaccagagatactgactccattaataaac

SEQ ID NO: 603 - DNA, 67 bp, Homo sapiens
acgcctgtgtccccgcgttctgagaagtcctctgtcttcgtgtcactaggtccagaaagtcgcgccg

SEQ ID NO: 604 - DNA, 220 bp, Homo sapiens
gaacgcaggccgctttattcctctgtacttagatcaacttgaccgtactaaaatccctttctgttttaaccagttaaacatgccttttttacagctccatttttgatagttggataatccagtatctgccaagagcatgttgggtctcccgtgactgctgcctcatcgataccccatttagctccagaaagcaaagaaaactcgagtaacacttgtttga

SEQ ID NO: 605 - DNA, 59 bp, Homo sapiens
agcaagtgtagacaccttcgagggcagagatcgggagatttaagatgttacagcatatt

SEQ ID NO: 606 - DNA, 100 bp, Homo sapiens
atcaagtatgatgttcccccaacgtggacacactcagttcctcacaaagccaagcccactgcagctgccacatccctgggcttacggtgcagcaggtgct

SEQ ID NO: 607 - DNA, 240 bp, Homo sapiens
tgagccctgatttcaccgctgcattccagcatgggcaacggagcaagaccctgtttcaaaaaagcaaaaaaccaaaaaaaaaaaagaaaaaaaaaggaagtctttcttcagatacttacgtgaaaaaaaacctgcaatccaacgtggggaacagagtaaaactccatctaaaaaataataataaaagaggctgaggaaggagcatcgattgaggccatgcgttcaggaccccatctttac

SEQ ID NO: 608 - DNA, 39 bp, Homo sapiens
aacaagtaacctttgcagaattccacccatctttcaagg

SEQ ID NO: 609 - DNA, 270 bp, Homo sapiens
catttactctaagtacccagtttttataatttatatgaaatcagatttcaacacttactttgtcattttgtagatcattttttttaaatactgtgtaaaaactttttttacacctaagctgtgtttttgatactgatattttcctatgctgaatagttttcttactttcagggaaggtaagaaaatacttttttatatttgttacttatgtaacattcatatttttctcattttgatatttgtaacatactgtatgctttctacttgtaa

SEQ ID NO: 610 - DNA, 148 bp, Homo sapiens
gaggaagttccacggcaggtggtgcgttcccatgtaggcaccaagtggaagcttgcacggtgggccacggccgtggcgggtgccctgtgggtgaggctgggtgatgacctgaggaccagagacacgcgaccatgttggggctcttgga

SEQ ID NO: 611 - DNA, 36 bp, Homo sapiens
aaaaaagttcaactagtatgaaagggttataaagta

SEQ ID NO: 612 - DNA, 273 bp, Homo sapiens
caatggaatgtgaaggcagtatactttaaggctatttactttcacacagaatgtttatctattagtcagtttgtattctactcaaatgcagatagacgggtataatgttttcttgtgcatttgaaacctatcaaggagaaaataaaccattccactaaaatacataggccaaacaccatctgggaaagtgataaaagctatccagaggctatgctatgtaaaatagcaaggtcaatttacatgggttgcatagtacttggctatgcagttttc

SEQ ID NO: 613 - DNA, 224 bp, Homo sapiens
tacaacacaagcagtgtagcactaggcactgcaattgtcaaagacaattagactggaagcaggaaaatttcacctccctgtttcagtgatatgtagaatgtcggcagcatgggtcagccttgccacagagttgtgtgagaatatatgaatcagtcctatagaatgttaaatatttataaaatggttctgtagtacaccaaggttgggagcacattcattccttc

SEQ ID NO: 614 - DNA, 162 bp, Homo sapiens
  misc_feature (28)..(28): n is a, c, g, or t
aaaaaattcagtgctcagtattgtaacnactgtccctactgaatattccttttcataaatacttgctaccacagggaaattaagttttcatatagaataactagtttcagtagtaaccattgaagaattaaaaatgtggttcaaggcagatatttttatgaa

SEQ ID NO: 615 - DNA, 228 bp, Homo sapiens
gtatcctttaatgctttatgtgcaacctttcattgatagtgggctgatgtttggcaatgcttctgaactgtcacagagcaggctgtagctttccacagccactgcccatgcataagcagaacagcctggccttttgaatgtattttcctgggttttttccccttttctttttttagtttagagatgcagtaacaaaactgttgcaaagcactggcattttatgtattc

SEQ ID NO: 616 - DNA, 282 bp, Homo sapiens
aaatcacattattcagttgcacagtttcagttgcccagcagtatcattaaatcctctggagtgattccagtcccacaaaaattagggacccctttacattgtttccatattcaaatggaaatctttttgcaagttagtaattaaagtatttaacctctctctccctccatttattagaaaactcttttttctttattttttcaattacgaaaaaactgctaaagccaatcaagcatttattttgataaaccgcttgtaacagtctcagctaaattctgcaaa

SEQ ID NO: 617 - DNA, 289 bp, Homo sapiens
aagaagtgcctctttctgctgggtgcagtggctcatgcctgaaatcctagcactttgggaggctgaggtgggaggattgcttgtgtttgggagattgagaccaatctgggcaatatcatgacacctcgtttttacaaaaaataaaaaagtttgccaggcatgggtggcatgtgcctgtctgtattcctggctacttgggaggctgaggtgagaggattgcctgagaccaggaggttgaggttgccgtgagccaagattgtaccactgcactggactggatgatagagca

SEQ ID NO: 618 - DNA, 151 bp, Homo sapiens
gcaagacgctgcactcgtggaggaagttctacactcgcctcaccaacagccgacacggtgagaccaccgtgtgagggacgcccccaggccggaaccgcgcggcgctttcctccgcccggggtggggcccctacagactccgtattttattt

SEQ ID NO: 619 - DNA, 249 bp, Homo sapiens
tggtcgggcaagacgctgcactcgtggaggaagttctacactcgcctcaccaacagccgacacggtgagaccaccgtgtgagggacgcccccaggccggaaccgcgcggcgctttcctccgcccggggtggggcccctacagactccgtattttatttttttaaataaaaaacgatcgaaaccatttcacttttaggttgctttttaaaagagaactctctgcccaacacccccacaaggtttgtaatt

SEQ ID NO: 620 - DNA, 85 bp, Homo sapiens
ataaaaaacgatcgaaaccatttcacttttaggttgctttttaaaagagaactctctgcccaacacccccacaaggtttgtaatt

SEQ ID NO: 621 - DNA, 249 bp, Homo sapiens
tgtcacctctgctggcacaccagtggcaaggcccagaatggcgacctctctttagctcaatttctgggcctgaggtgctcagactgcccccaagatcaaatctttcctggctgtagtaacccagtggaatgaatttggacatgccccaatgcttttatatgctaagtgaaatctgtgtctgtaatttgttggggggtggatagggtggggtctccatctactttttgtcaccatcatctgaaatgggga

SEQ ID NO: 622 - DNA, 202 bp, Homo sapiens
ctatcctagacatggtgagtactaagcttttttagtactatttcctagcccaggggctgacctatgggaccttccacagacttctgctttctgctctgtacttctgtaacaactccaataatttattttctggagggagaaagggattttttaaccactggtttgagaatgagactggaaaaggtaagtcccttgctacttg

SEQ ID NO: 623 - DNA, 211 bp, Homo sapiens
ataaaggtaggggaacagtgcacccccattgtttgtgaactcatggccactcttattttcttttacaccacccaccctccaattccaacttagattgtcttgaagcatatctcagacatcatatcattttatatgtaattgttttagtatgtatttctagtcattaatatttcacaaacataagaaaataccataattacaccaaaaatta

SEQ ID NO: 624 - DNA, 164 bp, Homo sapiens
agtgcacccccattgtttgtgaactcatggccactcttattttcttttacaccacccaccctccaattccaacttagattgtcttgaagcatatctcagacatcatatcattttatatgtaattgttttagtatgtatttctagtcattaatatttcacaaaca

SEQ ID NO: 625 - DNA, 122 bp, Homo sapiens
ttcgtcttctgcttctgcgctctgttggagtttgctgtgctcaacttcctgatctacaaccagacaaaagcccatgcttctcctaaactccgccatcctcgtatcaatagccgtgcccatgc

SEQ ID NO: 626 - DNA, 108 bp, Homo sapiens
caatcacgggcggtcctgcacagattcccaggccagggctgggtcacaggaaggaaacaacattttcttgaaaggggaaacgtctcccagatcgctcccttggctttg

SEQ ID NO: 627 - DNA, 259 bp, Homo sapiens
gaggattgtgctgatgtagtgaccaagtgcaatatgggcgggcagtcgctgcagggagcaccacggccagaagtaacttattttgtactagtgtccgcataagaaaaagaatcggcagtattttctgtttttatgttttatttggcttgttttattttggattagtgaactaagttattgttaattatgtacaacatttatatattgtctgtaaaaaatgtatgctatcctcttattcctttaaagtgagtactgttaa

SEQ ID NO: 628 - DNA, 33 bp, Homo sapiens
actttccattcacagtcgggctccttatcttca

SEQ ID NO: 629 - DNA, 159 bp, Homo sapiens
catttacctctgtatcaactcaggaaatctcataagctggtaccactcaggagaagtttattcttccagatgaccagcagtagacaaatggatactgagcagagtcttaggttatcaaggacaaccaccctagcttcttagtgaagacaatgtacagtt

SEQ ID NO: 630 - DNA, 245 bp, Homo sapiens
agatgctgtgtaactaaactgaaataattcaattacttattatttagaatgttaaagcttatgatagtcttttctaattcttaacactcatacttgaaatctttccgagtttccccagaagagaatatgggattttttttgacatttttgacccatttaataatgctcttgtgtttacctagtatatgtagactttgtcttatgtgtcaaaagtcctaggaaagtggttgatgtttcttatagca

SEQ ID NO: 631 - DNA, 222 bp, Homo sapiens
atgatagtcttttctaactcttaacactcatacttgaaaactttctgagtttccccagaagagaatatgggattttttttgacatttttgactcatttaataatgctcttgtgtttacctagtatatgtagactttgtcttatgtgtgaaaagtcctaggaaagtggttgatgtttcttatagcaattaaaaattatttttgaactgaaaatacaatgtatt

SEQ ID NO: 632 - DNA, 251 bp, Homo sapiens; identical to SEQ ID NO: 211

SEQ ID NO: 633 - DNA, 245 bp, Homo sapiens
agatgctgtgtaactaaactgaaataattcaattacttattatttagaatgttaaagcttatgatagtcttttttaatttttaacactcatacttgaaatctttttgagtttccccagaagagaatatgggattttttttgacatttttgactcatttaataatgcttttgtgtttacctagtatatgtagactttgttttatgtgtcaaaagtcctaggaaagtggttgatgttttttatagca

SEQ ID NO: 634 - DNA, 276 bp, Homo sapiens
aaggagtctgtgaccgatgcaattttacagacagaccagattttcacagaaaaggaaaaggagattgaagtggaatgtgtaaaagctgaatctgcacaggcttcagcaaaaatggtggaggaaatgcaaataaagtatcagcagatgatggaagagaaagagaagagttatcaagaacatgtgaaacaattgactgagaagatggagagggagagggcccagttgctggaagagcaagagaagaccctcattagtaaacttcaggtatccaaatgc

SEQ ID NO: 635 - DNA, 273 bp, Homo sapiens
gagtctgtgaccgatgcaattctacagacagaccagattttcacagaaaaggaaaaggagattgaagtggaatgtgtaaaagctgaatctgcacaggcttcagcaaaaatggtggaggaaatgcaaataaagtatcagcagatgatggaagagaaagagaagagttatcaagaacatgtgaaacaattgactgagaagatggagagggagagggcccagttgctggaagagcaagagaagaccctcactagtaaacttcaggtatccaaatgc

SEQ ID NO: 636 - DNA, 194 bp, Homo sapiens
gttttaatcctaaagcataagttagtcttttcctgatttttaaaggtcatacttgaaatcctgccaattttccccaaagggaatatggaatttttttgactttcttttgagcaataaaataattgtcttgccattacttagtatatgtagacttcatcccaattgtcaaacatcctaggtaagtggttgacatt

SEQ ID NO: 637 - DNA, 300 bp, Homo sapiens
gtgggtactctaaagtcagtggaaattaaaagaaaaatatattccagtagttatttacagatgaaaatgatgctgacaatagacagtaatggtttttccatgtctaggtttgtgagtttgtgaaataattatttctctatacatgtgaaatgaaagaaagaaactgtcagtctgtcctctatcccagtccattttgcctctaggtaacaagtctttggcttacatcctttctttgaacttactgtgtaatattagagcacaagattcatggtactctttatcaaagaatggtgcagtcct

SEQ ID NO: 638 - DNA, 82 bp, Homo sapiens
gttatttaagatggctatccagataatcctgaacactgtgtatttattttatttagactaccagcaaagattaaagcatgaa

SEQ ID NO: 639 - DNA, 300 bp, Homo sapiens; identical to SEQ ID NO: 637

SEQ ID NO: 640 - DNA, 59 bp, Homo sapiens
cataaaatcgattccagtaatcatcaatgatacagcctaattaaaatcagcccaattaa

SEQ ID NO: 641 - DNA, 174 bp, Homo sapiens
ttggtttcggtcagaagaattttactggaacctggaggtatcccattcttcataataataaaaaagaaatgtagtgtataaaagctccaggttacattactaagcaacgacatttccgggagtgaatatacttcctgtattccgcaagctgcttcaagtacatattcgacggcc

SEQ ID NO: 642 - DNA, 203 bp, Homo sapiens
agaaatttaccccagtatctgttttttacaatgctaatttttgtcaaatgggatttgccagtggttgattaactcaagtgattaaaatacaaaagacataaaatcgattccagtaatcatcaatgatacagcctaattaaaatcagcccaattaaaatatttcctggaatatatctatagggaatttttagtgtttcactttg

SEQ ID NO: 643 - DNA, 178 bp, Homo sapiens
aagagatcctcagtcaattgcccatcaaacaagggcttctggaatttgtcgatatcacagccaccaaccacactaacgagattcaagattatttgcaacagctcacgggagcaagaacggtgcctcgagtctttatcggtaaagattgtataggcggatgcagtgatctagtctcttt

SEQ ID NO: 644 - DNA, 166 bp, Homo sapiens
aacctggaggtatcccattcttcataataataaaaaagaaatgtagtgtataaaagctccaggttacattactaagcaacgacatttccgggagtgaatatacttcctgtattccgcaagctgcttcaagtacatattcgacggccctctgtgcgttttaacaaaa

SEQ ID NO: 645 - DNA, 61 bp, Homo sapiens
aatcatgagaattatgggttaaaaagccacaaagaagcacatattggtgaccatcattaat

SEQ ID NO: 646 - DNA, 146 bp, Homo sapiens
aatgttatttgtacaaacattgcacagactattttaataacatgatttgttctttaaattttatgtgttttattgaaatgtttttaagatgaatacacctgcctttggatcaactatttaaacattgtatgcattttgatttttcc

SEQ ID NO: 647 - DNA, 216 bp, Homo sapiens
gtctcagaaatggaccagctggatgcagggcaggggactgagggtgcttgagtaggatgtgagacttcatgggcctgggttctgttgagttttttcagtatcaatttcttaaaccaaattttaaaaaaaacaaggtgggggggtgctcatctcgtgacctctgccacccacatccttcacaaactccatgtttcagtgtttgagtccatgtttatt

SEQ ID NO: 648 - DNA, 80 bp, Homo sapiens
caggctgggtcgccctggactgtgtgctcaggagccctgggaggctctggagcccactgtacttgctcttgatgcctggc

SEQ ID NO: 649 - DNA, 156 bp, Homo sapiens
tgggtcgccctggactgtgtgctcaggagccctgggaggctctggagcccactgtacttgctcttgatgcctggcggggtggggtggggggggtgctgggcccctgcctctctgcaggtccctaataaagctgtgtggcagtctgactccaggaaa

SEQ ID NO: 650 - DNA, 216 bp, Homo sapiens
tatgctgtgagtgtccttatgggtgcaagagatagggctgtgcctctctgcgtttccaggtggagtagagacagtaatgggtagagactttaggaaatgttttggggtggtggaatactctatatattgacaagagtttatatattgacaagagtttatatatttgtcaaaactcctcaaatagtatgttaaagacgtaagcgtttcactatgtat

SEQ ID NO: 651 - DNA, 252 bp, Homo sapiens
  misc_feature (100)..(100): n is a, c, g, or t
ttatcacgtgtgtaacatctcttgagggctgctttgtaattcatttgtatggtgttgttgtaccagtgtaactgctaagtggtttctctggttccatgtncatttgtacatgaagttgtgcaatctccacataccagcagtttcaaagaatgacagtttgcatgaggccatcttaatagcaggtagcatgtaaccaacccatctgaattaagccaccattgcagaataaaacatttgacactaagccaggta

SEQ ID NO: 652 - DNA, 298 bp, Homo sapiens
aaacccttggcagtgtactaaggtagtcagtcttagcacatgtgaacttcaccagccaagaggaattcaagtagaattcaaagaataaaaccctgtttttaactcaagacagaactatgctgagctctaccgaaagccttgacacagttaacactatgacacataatcaccaggaggcttcatatatctataaacatgtctgcatactctttgtagacagctgacctgcttggttacgtatatcattccttcatttcaaaaccctgcaagttaggaggaagtatttgcatgtcactaa

SEQ ID NO: 653 - DNA, 175 bp, Homo sapiens
agttgtggacaaaccgtaggaatgtatgtgtgcgtgtggtggagtgattgtctgtgaatgacaggccctggctattgattgatgttgcatcaatttagcaaattcatttcctcattcttgatggcctgaatatatgtctgcacttttaatgctcctcttaaccagttgtaacatc

SEQ ID NO: 654 - DNA, 251 bp, Homo sapiens
ttattgttattcatgctggacctcaggtacaaaaggttaagaacttttcagttcattatatgatcatcattggtgcctccgagctctctctctttcccttgatttatttggtcccttttatctccagtccttactcccatatttaaccttttacccctacctcataggtaaacattttaatgaatttgatgtttccttttatttgcatagatcctctgtaatatgtagtagtgtccagtgtacatgtattt

SEQ ID NO: 655 - DNA, 89 bp, Homo sapiens; identical to SEQ ID NO: 163

SEQ ID NO: 656 - DNA, 193 bp, Homo sapiens
ttagtccaactaatgcagtcgatacaatgcgtagatagaagaagccccacgggagccaggatgggactggtcgtgtttgtgcttttctccaagtcagcacccaaaggtcaatgcacagagaccccgggtgggtgagcgctggcttctcaaacggccgaagttgcctcttttaggaatctctttggaattggga

SEQ ID NO: 657 - DNA, 181 bp, Homo sapiens
tcttaaccacggtacaagttccctcttcccaatacattcccctcgctactatataatgacaaggattaacacaaccgtgaaagcacctcaccaatcccctactacatacaatgctttaatttaaccaaatcagtcatttatttatcaagtgtgtattttgaggtcctatccaaaattaaaa

SEQ ID NO: 658 - DNA, 165 bp, Homo sapiens
caagtatggaaacttcaccagactttttcttctaaaatctggatgtcattgacgataatgtttatggagataaggtctaagtgcctaaaaaaatgtacatatacctggttgaaatacaacactatacatacacaccaccatatatactagctgttaatcctatgg

SEQ ID NO: 659 - DNA, 274 bp, Homo sapiens
cgtttgaggttccaaataaaatcatcaacagagcaaaggaaactctgaagattgatattcttcacaaacaagcttcaggaaatattgtatatggggtatttatgctacataagaaaacagtaaatcagaagaccacaatctacgaaattcaggatgatagaggaaaaatggatgtagtggggacaggacaatgtcacaatatcccctgtgaagaaggagataagctccagcttttctgctttcgacttagaaaaaagaaccagatgtcaaaact

SEQ ID NO: 660 - DNA, 260 bp, Homo sapiens
aatattactcaacgaaatctacaatctgctgaaatccaaattctgatcatctaaattctgctgaaataatgagaatatttgtttcaacttattttgaaaagaaaattactcaagacagttttatcaatgctattaggctgccacattgtagaagggaataaagaggcttttttgataatcttcctataccccctcaatcaggagctccctacaactgggtcaacataaagcattaaatatctttaaatagggcagacatt

SEQ ID NO: 661 - DNA, 38 bp, Homo sapiens
tgtggttgtcctctggatataatgcaaactggcctcca

SEQ ID NO: 662 - DNA, 237 bp, Homo sapiens; identical to SEQ ID NO: 43

SEQ ID NO: 663 - DNA, 81 bp, Homo sapiens
actgaaatatacatttgcgccccctgaaccttctactatctaattttgacccaaaatttagcttaactttagttattctga

SEQ ID NO: 664 - DNA, 241 bp, Homo sapiens
taaaaatataccgtgttggtggtgaatgactattgatgactgtgttaagtgcatctgtattgtaagtgaaatgtaattatttctgtgtaccatatggagtaactaaggtcattgtttttgacaattttgtttgaaattcatatatcttatttcaaaggatagcataatatctgcattatgctggaaaaaaatagacctttggagaatacttaaataaaacatgtgcatgcttgaacaggac

SEQ ID NO: 665 - DNA, 246 bp, Homo sapiens
ttctagacagtttgacctgttatacagagtaatattctgtggccctttgactttgtgaatgagcacaatgaaatgccgcctactgatgcttcttatgatcagaactcttttttaataaaataaataacataaatcgttgaacataatgttccagttgaatgcaaaacaaaaaaaatatggaaaacattttgataaaattttttcctgttaaaaccatgaacattggctatgatgaagattattaca

SEQ ID NO: 666 - DNA, 286 bp, Homo sapiens
  misc_feature (252)..(252): n is a, c, g, or t
gtctgtgcagccttcggaaacgtgccccccagcccgacgagcaaaacgcatgagagcagaggccatgaatattaaaatagaacccgaggagacaacagaagccagaactcataatctgagacgtcgtatgggttgtccaactccaaaatgtgaaaatgagatagaaatgaagagtagcatcaagcaagaacctattgagaggaaagattatattgtagaaaatgagaaggaaaagcccaagagtcgatctanaaaagccaccaatgctgtggacctgtatgtctgt

SEQ ID NO: 667 - DNA, 251 bp, Homo sapiens
agctatcattactggctgtggatagcccatagctattttccttgcttttcttttttaaaggggtttgttttgcagtggagaagacattttggtgaccagacttttgcttaccttttcctattctgttgccaatttttgttttccccacattctatagccataaacctgaagatgagtaaaactggtgggtctttaataaaacaacaacaaaaacagcagtttgtgatatagcagaggtttaaatgtaccct

SEQ ID NO: 668 - DNA, 215 bp, Homo sapiens
  misc_feature (178)..(178): n is a, c, g, or t
  misc_feature (181)..(181): n is a, c, g, or t
tcctgtccatctcagttaaataataatcataactcatgtaagtctagaatttgtctcaaagttatgcctacctggctcgtaggatgccaacgttaggagtgaaaatagtcaacgctctcccgagagagcacatgacactacatgagcttcatcaagaccctcggaggcccagaatgcncancaaagagccatcgacgataattcttctacccaac

SEQ ID NO: 669 - DNA, 213 bp, Homo sapiens
gggtgttgctgaaaccatccgtaacggctccaacgttcgctgaggagagcccggccaactccttcctccgtggccggaactgggtgcgctcctacacccctgttttttttgcccacctttcgggagggtctgagtccgagttggcctaagcggcggttggacgggctgggaccgttgggaagcgggtttaactgcctttcctgctgtttaaga

SEQ ID NO: 670 - DNA, 132 bp, Homo sapiens
gtgagcctgccagcgtttgcgacgtccccgcacgacaggctcatactttctgaggatcgtgcatagcataggacgtctgaacctttgtacaaatgtgtagatgacatcttgctacagcttttatttgtgaat

SEQ ID NO: 671 - DNA, 126 bp, Homo sapiens
tgtggctgtgatttccgacgtctggtgtgtggagagtactgcatgagcagagttcttctattataaaattaccatatcttgccattcacagcaggtcctgtgaatacgtttttactgagtgtcttt

SEQ ID NO: 672 - DNA, 75 bp, Homo sapiens
ggacacttttgaaaacaggactcagcatcgctttcaataggcttttcaggaccttcactgcattaaaacaatatt

SEQ ID NO: 673 - DNA, 268 bp, Homo sapiens
tatatctaggcaacaacacttagaagtttatcagtgtttaaactaaaaaaataaagattcctgtgtactggtttacatttgtgtgagtggcatactcaagtctgctgtgcctgtcgtcgtgactgtcagtattctcgctattttatagtcgtgccatgttgttactcacagcgttctgacatactttcatgtggtaggttctttttcaggaactcagtttaactattatttattgatatatcattacctttgaaaagcttctactggc

SEQ ID NO: 674 - DNA, 264 bp, Homo sapiens
cccgtgaggaaggcccggctccgtaggggcctcacacaaggagtgtttggcttacagtgaattgtccggggggttttgcccacctcctcctcatctccgtattcttcagcttcatccaaaactgacttagaagcctcccttgaccctcacctgactattcacaggttatagcactttatgtttttcagttctgttattttaattggtgcctctgtttgtgatctttaagaacataaaattctggcaagtaactatttgctaaca

SEQ ID NO: 675 - DNA, 283 bp, Homo sapiens
gggtctcttgcaaatcccacgagggtgttggagaaagcaggctggggctctagccttttgggcaggagtctcggacacaggaagggtggtaatgggggacaccaggaaacagccccatgcctcgagatgggagagggctggggcagagcctgtgagggccacagcagggtcagagctgcctcctcagacctggcgtcccagtgggaggaggtgcttggggaggggggtcaggaagaagctgatcgaagacccgtctggtgtgtgttaccttggtgggtctcca

SEQ ID NO: 676 - DNA, 227 bp, Homo sapiens; identical to SEQ ID NO: 220

SEQ ID NO: 677 - DNA, 95 bp, Homo sapiens
acacaggggcatacagagtatagctaagctatgagtacacaggggcatataatggactttagagactaaaaatggagaaggtaatagcggggcta

SEQ ID NO: 678 - DNA, 239 bp, Homo sapiens
gaaataagccgcatgattgacaagagctctacctgcttttgtggtgatgtgcaatttcaccatgaatttcaacattacaacctctcttaattcccaccctctgaggtggttagccccattttattgttgaggaagctgaggctctgagaggttaagtcactcacctataatcatacaggttgttcccaggccctgactctggatcacctgctgtagtacggctctaggccgcctgggca

SEQ ID NO: 679 - DNA, 197 bp, Homo sapiens
gacctccactcattgcctgtgtgtccaggtgggccagtctcagctgccccgcttggcgttataaccattgtggtgttagccagggacgaggcttctgaagtagcctgcactgtgagccccgctggctgccaggtaataattccacccgccttgacctttttctccaaggaacaggccttctactttatacatggaga

SEQ ID NO: 680 - DNA, 119 bp, Homo sapiens
ataaataggttacttaccatcatatgttcatatagatgaaaataatttttggcttaagtcagaacaactggccaaaattgaagtcatatttgaggggggaaatggcatacgcaatatta

SEQ ID NO: 681 - DNA, 156 bp, Homo sapiens
gaagccattattttaagtaaagtatgatagtagtggaaaaccaaaaactatatgctttcacttataagcaggagctaagctatgagtacacaggggcatacagagtatagctaagctatgagtacacaggggcatataatggactttagagactaa

SEQ ID NO: 682 - DNA, 296 bp, Homo sapiens
ggtaaccacaaagttatgatgaactgcaaacatccaaaggatgtgagagtttttctatgtataatgttttatacactttttaactggttgcactacccatgaggaattcgtggaatggctactgctgactaacatgatgcacataaccaaatgggggccaatggcacagtaccttactcatcatttaaaaactatatttacagaagatgtttggttgctggggggcttttttaggttttgggcatttgttttttgtaaataagatgattatgctttgtggctatccatcaacataa

SEQ ID NO: 683 - DNA, 237 bp, Homo sapiens
caacctgtcacacacaatgcgtgtgtatatatatatgaatatattggatatgtcatttctgtaagagttttgttaaaacctgattttcttttgtagtatccacattcttcatcaaagtacaaaaacgtctgtggagtgtcacaaactgtatgacatgttatttctttttaacagttgtctatatgcttagacccgtgttagtctctatatctgtgtggcaatatctgctgagacaag

SEQ ID NO: 684 - DNA, 257 bp, Homo sapiens
gaaacgcggaccaggcgcttcggcccggatgccggatccaggagaaggggacctcgcttgccgtgtccaccgccgcggccccagcgccaagaacagagcctggccgtgagtgaacgactggccggggtacaaatggttctgaagcacttgaagctcacaggcaaaggctaagagtctaaatcccatcccgccctctaggcaaatgtcgggagttattaacaattttatcagttgattggttggttagcaagctatta

SEQ ID NO: 685 - DNA, 263 bp, Homo sapiens
ttaaagaggcttagaacaagctaacaggcaatagaaatatgtatatcagattttttaatgtaacaaactacatgttaattgttatcttattctttttatctttagtagacacttttaaaagaaaagacaagtttgttgtgtttaactcaccaacacgtggtgtataatgaagacagaactataataaattagttttgttctgattttttagaacacttgcaataatgtatcatttatagttcttgctagttgcagtggtaata

SEQ ID NO: 686 - DNA, 142 bp, Homo sapiens
gctccagggccacggcggagtcatggttctcaggactgagcgcttgtttaggtccggtacttggcgctttgtttcctggctgaggtctgggaaggaatagaaaggggcccccaatttttttttaagcggccagataataaat

SEQ ID NO: 687 - DNA, 201 bp, Homo sapiens
  misc_feature (52)..(52): n is a, c, g, or t
ctggcccattgcttgtagttagttgatccatgtcatgcaccctaaaaatggntctgtcactgtgagtggcttcagtaggattttgagaataagtttatattcttgctaggtaaaacaaaacaaaaacgacagtaataccaaggaatttccccccccttttaccctccatttgtgtttattgcatatccactataacaacat

SEQ ID NO: 688 - DNA, 185 bp, Homo sapiens
cagtccctcactgacagacgtttccattgtttcctgtcttttgctataaataatgctgtaatgaatattcttgtgcatatttcacattaatttatgggattacatctgcaggataaattcttagaaccaatggtggtttgtggggagggtgacagggtggataggtacaggattgggagactttt

SEQ ID NO: 689 - DNA, 243 bp, Homo sapiens
gggatctccttttgtgaaaaccagtttgatgtgctaaaagtaaaaagtctattttccagtgtggtcttgttcagaagcagccagatttccaatgttgtttttcccctccactcagaaacccctgccctttcccttcagaaaacgatggcaggcattcctttgagtttacaagcagagactcactccaacccaaactagctgggagttcagaaccatggtggaataaagaaatgtgcatctggt

SEQ ID NO: 690 - DNA, 68 bp, Homo sapiens
ccacagtgtatgggagcccctgactcctcacgtgcctgatctgtgcccttggtcccaggtcaggccca

SEQ ID NO: 691 - DNA, 268 bp, Homo sapiens
gtcagtagggatgtgtgcctggctgtgtacgtgggtgtgcagtgcacgtgagagcacgtggcggcttctgggggccatgtttggggagggaggtgtgccagcagcctggagagcctcagtccctgtagccccctgccctggcacagctgcatgcacttcaagggcagcctttgggggttggggtttctgccacttccgggtctaggccctgccccaaatccagccagtcctgccccagcccacccccacattggagccctcctgctgc

SEQ ID NO: 692 - DNA, 238 bp, Homo sapiens
gtgggtgtgcagtgcacgtgagagcacgtggcggcttctgggggccatgtttggggagggaggtgtgccagcagcctggagagcctcagtccctgtagccccctgccctggcacagctgcatgcacttcaagggcagcctttgggggttggggtttctgccacttccgggtttaggccctgccccaaatccagccagtcctgccccagcccacccccacattggagccctcctgctgc

SEQ ID NO: 693 - DNA, 172 bp, Homo sapiens
agtttgtggatatcattcccttacttgtgtttatacttttaccaagtgtgtatgtattcaaaaaacagttgttttgtgattttaaaatgtaaatgaatggcgttatgctccatgtattctgcaacttttcatcatacattaggttttggcgatttagccataatttggcatg

SEQ ID NO: 694 - DNA, 87 bp, Homo sapiens
tgctcaaaggaaatggccactggaagatttcagattttcagatttggaatgctcaaccagtaagtatataatgcaaataatccaaaa

SEQ ID NO: 695 - DNA, 144 bp, Homo sapiens
aagatatattgatataggcccgggcgctgtggctcacacctgtaatcccgcactttgggaggctgaggcgggcagatcacaaggtcaggagttcgagaccagcctggccaatgtggtgagaccccatttttgctagaaacacaa

SEQ ID NO: 696 - DNA, 209 bp, Homo sapiens
ctgagtttccaaagttagggtacaatgaaagaaaaggtggcttatttatactctggaatattttccaagagttgaaaaggatgaggatacacacacacacacacacacacacacacacacacacacacacacacagtttgggtatccctaatccagaaattcaaatgctccaaagtccaaaactttctgacccaccaacatgactgatg

SEQ ID NO: 697 - DNA, 38 bp, Homo sapiens
tccttttcatcccatgttgccgctaagtgatatttcat

SEQ ID NO: 698 - DNA, 240 bp, Homo sapiens
tcatcccatgttgccgctaagtgatatttcatatgtgtggttatactcataataatgggccttgtaagtcttttcaccattcatgaataataataaatatgtactgctggcatgtaatgcttagttttcttgtatttacttctttttttaaatgtaaggaccaaacttttaaactaattgttcttttgttgctttaatttttaaaaattacatttttttgatgtaacatgtgatacatac

SEQ ID NO: 699 - DNA, 201 bp, Homo sapiens
aactctgtaaggaggaccatgtcagactattgtaagctaagcattaggactgatacaaataatatatgctcctggcatagaaaaataaaccacagagaacgagttcaaagaatagcaaagaaagaaagaggacccagtgggcgaaagatgagagtgtacttttaccaaaagttatctaagcctgagcacttgaagtctgca

SEQ ID NO: 700 - DNA, 212 bp, Homo sapiens
  misc_feature (79)..(79): n is a, c, g, or t
attactaatgatgggtgaacactttgacctatgtttgttaacaaattgtattttatcttctgtgaaaaaaaaaaaaaanacctttgggtcatggctttctgaagagactggtcccggatgtccttgggatgtagggagcccatagctcactggaggcattcaaggaaccagccaggcagcccccagagcaagtcgtgtttaggagattctca

SEQ ID NO: 701 - DNA, 160 bp, Homo sapiens
tatctcagtttcaaaatagggttaatcgtctttatctggcaggtcaggtgggatgtctcacaggtaagcaccagatgccatttgaaaggcttgaagcaaagtcaataaagcattcatgggaaaatacaactggaggcaccactagattttcgtatacatt

SEQ ID NO: 702 - DNA, 220 bp, Homo sapiens
tgcccccagtatgtttaggacgcgagccccagaaggatttgggagtaaacttaacattcactgtgtttttgctttgcatccgccatttgtgtgtgtttttggactgtgggctgtgtgtaccttggttggtgactcagtgagaagaagcaggaatgccaaagatactatgaatgttttgagttttgttgctgttgttgttgagaggttgtttcactggtat

SEQ ID NO: 703 - DNA, 233 bp, Homo sapiens
ccagagactctggacccggggcctccccttgagtagagacccgccctctgactgatggacgccgctgacctggggtcagacccgtgggctggacccctgcccaccccgcaggaaccctgaggcctaggggagctgttgagccttcagtgtctgcatgtgggaagtgggctccttcacctacctcacagggctgttgtgaggggcgctgtgatgcggttccaaagcacagggct

SEQ ID NO: 704 - DNA, 180 bp, Homo sapiens
ttcttttgccccttaatatcctcacccacatgtcctgtaccctgcctgaaccctcctcctctttttgttctgatctttgagctccctagagcccataattctttagagcaggtatgtcccgagtctgaaacatgcccttatttgtcccaagctctggacatttctcaccccaaggcggat

SEQ ID NO: 705 - DNA, 270 bp, Homo sapiens
ggacaccctgcacctattcccacgggacaggctggacccagagactctggacccggggcctccccttgagtagagacccgccctctgactgatggacgccgctgacctggggtcagacccgtgggctggacccctgcccaccccgcaggaaccctgaggcctaggggagctgttgagccttcagtgtctgcatgtgggaagtgggctccttcacctacctcacagggctgttgtgaggggcgctgtgatgcggttccaaagcacagggct

SEQ ID NO: 706 - DNA, 186 bp, Homo sapiens
gtgaaattccatctttattaaaaaaatacaaaaattatgggcgtggtggcacctgtctgtaatcctagctactcgggaggctgagagaggagaattgcttgaacccgggaggtggaggttgtagtgagccaagattgcaccactgcactccagcctgggctacagagcaagacactatcttagatc

SEQ ID NO: 707 - DNA, 97 bp, Homo sapiens
ggccaaaaagtctacattgcgtgtgtggatggatgaatgagcagtgggagtgcagcgccaggtgacaagatgttgtgaggggttttgagtcatccag

SEQ ID NO: 708 - DNA, 223 bp, Homo sapiens
ggcctcgagtttagtgctaaagccactagtgtacttatgctgtcacctaaccaccacatgcgacatggaggcagaggctaaatataggggctttcttaagaaagtgagaggaaattagcaagcattattagtgtttgactactgctatcaagtgaattcaaaggaaacaggtttttatgccatatttaagttacagaaaccaggcatgcttagaatagttttt

SEQ ID NO: 709 - DNA, 116 bp, Homo sapiens
ctgggccttggtccccagaagatggcggctagggcctcgccgccaggacagagaagggacggggtggctgggcagtcagggaaggagggtcgcccggatccgacattttggagaga

SEQ ID NO: 710 - DNA, 253 bp, Homo sapiens
ccaaggccaggagatagcttgaggccagggatcgagaccagcctgggcaacgtagcgagaccccacctctacaaaaacatttaattagcggggtgtggtggcatgcacctgtggtctcagctactttggaggctgaggcgggaggatcgcttgagccccaagaggtcgaggctgtagtgacccttgatcagctccactgcataccagcccaggcaacagggcaagaccctgtctctcatagagagctagagaa

SEQ ID NO: 711 - DNA, 220 bp, Homo sapiens
atcctgccatggctcggtggtggctcaggtggctgcttaaggctgaaaggtgggtctgaaatgaacctgcagaataatccaagccgagcctcacctgctgggtccagggctaaagcctttgagaatgctcccatggatcctggaactaggtctactgtggcagcaaggcacaggctgggggcctcaggggtcctggaggtcaggcaggtcagccagcagc

SEQ ID NO: 712 - DNA, 159 bp, Homo sapiens
cttcagaacctgaatgaactggcttcatacacacaaacatatttgtttatcccccaaatgtaggcacctggctcctccttgctcccctgctgatggtgtcctaccccgaactccaaaaattacacctggagtcaggtgcagaagggaaccttgtatttc

SEQ ID NO: 713 - DNA, 113 bp, Homo sapiens
atggtgtattctaggccacagcccagcactcctctgggctgctctcaaaccatgtcccatcttcagcatccctcccatcagcctctacagaggctgatggaagttgttcacag

SEQ ID NO: 714 - DNA, 277 bp, Homo sapiens
gtgccatctaccgaaactccacagtttccattgtgaatggcttctttggtgcagagttccaaaaattatgtagcccagctctttaattttgtaacatctaatgatatcaccgccttgaagtgattaaagtagattgcttaaagaattaaagctttaaagatgaaagatgttattgcttttgctggacatgaggaacagttgtaaagtttccaggtttacaataactttctggaaccctctcagtgaactgtttcttgtaaaagttttccctaagata

SEQ ID NO: 715 - DNA, 251 bp, Homo sapiens
aacctcagggagagtaagctctagtccctctgtcctgtagaaagagccctgaagaatcagcaattttgttgctttattgtggcatctgttcgaggtttgcttcctctttaagtctgtttcttcattagcaatcatatcagttttaatgctactactaacaatgaacagtaacaataatatccccctcaattaatagagtgctttctatgtgcaaggcacttttcacgtgtcacctattttaacctttccaa

SEQ ID NO: 716 - DNA, 219 bp, Homo sapiens
tgttgctttattgtggcatctgttcgaggtttgcttcctctttaagtctgtttcttcattagcaatcatatcagttttaatgctactactaacaatgaacagtaacaataatatccccctcaattaatagagtgctttctatgtgcaaggcacttttcacgtgtcacctattttaacctttccaaccacataaataaaaaaggccattattagttgaat

SEQ ID NO: 717 - DNA, 267 bp, Homo sapiens; identical to SEQ ID NO: 3

SEQ ID NO: 718 - DNA, 152 bp, Homo sapiens
caccatgggcggcaacgctgaaggacagccctgcaagtttccattccgcttccagggcacatcctatgacagctgcaccactgagggccgcacggatggctaccgctggtgcggcaccactgaggactacgaccgcgacaagaagtatggct

SEQ ID NO: 719 - DNA, 245 bp, Homo sapiens
aaaatgaaaaaaggccagggtggcggctcacgcttataatcctagcacttcgggaggctgaggtaggaggattgcctgaggacaggagtttgagaccaacctgggcaacatagtgagacccccctaccaacctttataaaaaattagccaagcatggtagcatgtgcctgtagtcccagctacttggaagactgaggtgggaggattgcttgagcccaggagacagaggttgcatgagctatgat

SEQ ID NO: 720 - DNA, 196 bp, Homo sapiens
tatgaaaacttaactctgctgtgtgttaggcaatcctgtaatcttttttgactcttaaaagaaattcatttctgaaatgcttggttggaagactgtgacaatagctcatgaaattgagtgttatttttttctttcttttttaaaaaaatatgtaaagtgcagtcttctgtattcctgcatattgtatatacctgta

SEQ ID NO: 721 - DNA, 268 bp, Homo sapiens
tactgcatagcaaactctttgggaaagaaaacgaaaatgttattgcacatgtaaaatatgaaaacttaactttgctgtgtgttaggcaatcctgtaatcttttttgacttttaaaagaaattcatttttgaaatgcttggttggaagactgtgacaatagctcatgaaattgagtgttatttttttctttcttttttaaaaaaatatgtaaagtgcagttttctgtattcctgcatattgtatatacctgtatatgttttcctgagca

SEQ ID NO: 722 - DNA, 163 bp, Homo sapiens
tcccttactggtagtaaataaggatgattaaacttttcattatgataacaccctgtagttccatctgcacacgttgtataaataggtacacagagctttttacaggcccctgagtcccctcactgaaaatcagagtgaagtgtgccacttcgaaatagagaca

SEQ ID NO: 723 - DNA, 126 bp, Homo sapiens
ttcctctctgtaattggttatcaggaagaatttgcttaatgactaacaccctaagcatcagacctggaatttggagttgcaaagtgactatcttcccatttcccatctcattttcaataacttcag

SEQ ID NO: 724 - DNA, 199 bp, Homo sapiens
tctgcttagccctaggagtctggttccctgccttcagttgcagagtgatgtgtttgtgtcattgttgatgtcacctcctaaaaagaccttcactttctggctgccacaaagccatatgtgttgctccccatatacagcctgacagagtaaatggagaggaagtgctggatttgtgtatcactggctatcagttcctcat

SEQ ID NO: 725 - DNA, 224 bp, Homo sapiens
ccagtataattaggggtgtttcagagcatccccagttatttagcacaacactgaaggagcacatcccctctccattttgacttctctccccacttttacagccactgccttcgtcagttttgtagaggtttgatttccatgtgggttttgttgtcattgttttgcatttttgttttgttattgatattgtttgctttcattgctaaaactcatatacgacttac

SEQ ID NO: 726 - DNA, 230 bp, Homo sapiens
ttggtccatttcttacaagtcatgtatcccaaactgtgtcagcactggcaagtgatctggatgatggctgcagtgatgctggtcttgactgttgtgctggggctctacaattcctataactcttgtgcagagcaggctgatgggccccttggaagatccacttgctcggcagcccagaaggactcctggtggagctcaggactccagcatgagcagcctacagagcagta

SEQ ID NO: 727 - DNA, 122 bp, Homo sapiens
cctacatgacaatgtgacactccatctcaaaaaataataataataacaatataagaactagctgggcatggtggcgcatgcatgtagtcccagctactcctgaggctcagtcaggagaatcg

SEQ ID NO: 728 - DNA, 237 bp, Homo sapiens
atatgagcattgttgttgggactacagtgctattttaaagtgaaatttagttgatttgcatgtgagtatacacctacaggtctctgttatagccgtgacatgtcttctgttactataaattacataacaaatccttatggtttcttgggtcacttattttatttaaagacaaaaacatctttcagtacatatgtaagacttaaggcattattgaaaataagcctgtgctacatggta

SEQ ID NO: 729 - DNA, 152 bp, Homo sapiens
actgaaagggtgtgaaggtctaaagtctttccttatgttaaattgttgccagatccaaaggggcatactgagtgttgtggcagagaagtaaacattaccacactgttaggcctttattttattttattttccatcgaaagcattggaggccc

SEQ ID NO: 730 - DNA, 191 bp, Homo sapiens
tttaaattcttaatgcaaatgacgtagcaatttgaaaacttctccgtattacttgtgtttaaaatgtcttgctttaaatacaaaacaaatggtaaaggggattatcttttgtttagatggttaaatattatttttgccttagatagctttgtaataatttttctccagacagttcaacacttttgaaaaat

SEQ ID NO: 731 - DNA, 267 bp, Homo sapiens
aatgtattgatactctcagggcaaattcactatattgctatacagttgagatcagtgttgtaaaattaaactgatctggttctaattgcctcaaaggccaaagcccaggcatttgaaatggaaagaagcagagaggaggctgacttagctgattggtatggaaacagttgggccaagagccagaatttccctttgtagcaacacggctagttttactttgagaagctctgctcagctgctttataacattaagtctggcggaatgga

SEQ ID NO: 732 - DNA, 214 bp, Homo sapiens
gatgacttttcctatgggatgcacagggtggaaacaagctgctctcagtgtggtgctcaccttgggcacatttttgatgatgggcctcgtccaactgggaaaagatactgcataaattcggctgccttgtcttttacacctgcggatagcagtggcaccgccgagggaggcagtggggtcgccagcccggcccaggcagacaaagcggagctct

SEQ ID NO: 733 - DNA, 240 bp, Homo sapiens
ttatggctgctaagtttgttattcagcaatataaaactagtatgtctatgttccatttcaagttaattttgtatattttgtgaagtaagggtaaagattcatttatttttccatatggacatcaaactgttccagcatcatttgtgggaaaaggcccacacattttggtaattttgttgaaaatcaattgaccattgctaggacctcaaaaagaagggcctaattatagtctctgttctg

SEQ ID NO: 734 - DNA, 112 bp, Homo sapiens
aaattaacaaagtgtcactccataaaaagaaagctaatactaatagcctaaaagattttgtgaaatttcatgaaaactttttaatggcaataatgactaaagacctgctgta

SEQ ID NO: 735 - DNA, 263 bp, Homo sapiens
cttaagagttcactgggctgggtgtggtggctcatgcctgtaatcctagcaccacaggaggaggccgatgtgggcggatcacttgaggtcaggggttcaagaccagcctggccaacgtggcgaaatcctgtcgctactaaaaatacaaaaattatctgggcatggtggcgcacatctgtaatcccagctactcaggaggctgaggcaggagaatcactcaaacccaggaggcagaggttacggtgagctgaggtggtaccact

SEQ ID NO: 736 - DNA, 36 bp, Homo sapiens
ttcagttataagaatgtccaaacttggcacggtggc

SEQ ID NO: 737 - DNA, 169 bp, Homo sapiens
accaaacagaagctcaatattgagatttccgatgagttcctggtacagttcagacaggacaaagtatgtgtgaagtttattcagggaaaccagaaaaatgggagtgtcccaacatgtaaacgaaaaaacaaccgtctccttgaagttgctgtcccttaactggcgcctc

SEQ ID NO: 738 - DNA, 224 bp, Homo sapiens
tacaagggttcattttggaaactacattttaaactttggaatcaaattgttttttatttgggaggataatgtatatacattggtattatgttaaataataaaattgttttaatttggtgccctttcctgaatcacaactgtatttttgtatttcaagctattttcatatgttatgtgtcaaagtatcatttttcagaaaggttttacaatccaaacattatatg

SEQ ID NO: 739 - DNA, 112 bp, Homo sapiens
ctctctactttcatggacttgttcctttgtaatagtgcaatttggttttgttttatttggggttcattgtatgtttgggaatcaccaaaggcttttagagttctttggcaaa

SEQ ID NO: 740 - DNA, 297 bp, Homo sapiens
gcagtagaaagaccttcttaaaaagggctgggcgtggtggctcacacctataatcccaacacttagggaggcggaggcaggtggatcacctcaggtcaggaattcgagactagcctggccaacatggcaaaaccctgtctctactaaaaatataaaaattagctgggcgtggtggcagggacctataatcccaactacttgggaggctgaggcaggagaatcgcttggaggcagaggttgcagtgagccgaggtcacgccactgcactccagcccgggtgacaatacaagactccat

SEQ ID NO: 741 - DNA, 249 bp, Homo sapiens
  misc_feature (150)..(151): n is a, c, g, or t
  misc_feature (153)..(154): n is a, c, g, or t
  misc_feature (156)..(160): n is a, c, g, or t
  misc_feature (162)..(167): n is a, c, g, or t
tggtgcaccttggacacgtggacaaggcccaggcgccctctgctcttctgccctcgatgccacatggcggtgaacacatctgaagccactatgtttcctggctctaaggctcgtctgtgtaacccataaaacctgctttgattccaaaannannannnnnannnnnnaaggaggtgccccgatgcttggggtgggtgttcctgccggggcttcaaggggtgacttctgtaggctgtccaggtccgaggc

SEQ ID NO: 742 - DNA, 219 bp, Homo sapiens
tagaaagaagggtcctcatctacattctcaaacatctgtggctgatatgatatgattcttggaatttgcttcaaaataataagtctggatgttaagtgcattggaaatattgatgaaacgaaattggccttgataattgttgaagctgggtgatggctaaaatgatggttcattatatatgttcatctctatttttgtatgtttggcattttccgtaat

SEQ ID NO: 743 - DNA, 298 bp, Homo sapiens
  misc_feature (143)..(143): n is a, c, g, or t
  misc_feature (182)..(182): n is a, c, g, or t
  misc_feature (238)..(238): n is a, c, g, or t
  misc_feature (252)..(252): n is a, c, g, or t
gactattctccaaggttgttgcactaccgctgtatctggacataattctaaccttggcacccgcggggccccctttggtggggctccttatgggggcctgaaatttcccgggcagaaatatacccccccttgaaaaggccagngaaactgggttctccttaaaccctttttaaaaataaccnaggccttaagaggaaaattgcttataacaataatgggaaaaacattccgtggaaangatttgtgcctccncatcgtctccattcacttgtgaaactggtatatcttccaattggcc

SEQ ID NO: 744 - DNA, 232 bp, Homo sapiens
  misc_feature (71)..(71): n is a, c, g, or t
  misc_feature (117)..(117): n is a, c, g, or t
  misc_feature (131)..(131): n is a, c, g, or t
  misc_feature (140)..(143): n is a, c, g, or t
  misc_feature (145)..(146): n is a, c, g, or t
ccaggagctttagtctagcctgagcaatataatgagactccgtctcttaaaatatttgcccaaacattgancctaaatttgaccatgcccctagaaataattcctaatctttagaanatagggcagagaancattatttnnnncnntggagatgagatcagcagaatccagactataagaaactacaggacacatgacctagtttcttctgtaaataacttgcaaggatgaa

SEQ ID NO: 745 - DNA, 224 bp, Homo sapiens
tatgttagaaagaagggtcctcatctacattctcaaacatctgtggctgatatgatatgattcttggaatttgcttcaaaataataagtctggatgttaagtgcattggaaatattgatgaaacgaaattggccttgataattgttgaagctgggtgatggctaaaatgatggttcattatatatgttcatctctatttttgtatgtttggcattttccgtaat

SEQ ID NO: 746 - DNA, 181 bp, Homo sapiens
gaaggttggttaccagaagctggaaaggaaagtggggttgggaggaaggtgggaatggttaataggtacaaaaaaatacaaagaataaataagacctaatatttgatagcacaacagtgtgactactgtcaataatcatttaattgtacatttaaaaataactataattgcattgtttgta

SEQ ID NO: 747 - DNA, 147 bp, Homo sapiens
aaaagcaactattgctcaggaaataatacactccatattttgatcatgcaggctgtttgtattatagttatttttgttattctttgcatacctttatccacctgtgcttaaggaaggatcctcatatgttcatactgagctgttgga

SEQ ID NO: 748 - DNA, 281 bp, Homo sapiens
tcagttggtgggtgttaagctagaatgggctgtgtgataggaaacaaatgccttacagatgtgcctaggtgttctgtttacctagtgtcttactctgttttctggatctgaagactagtaataaactaggacactaactgggttccatgtgattgccctttcatatgatcttctaagttgatttttttcctcccaagtcttttttaaagaaagtatactgtattttaccaaccccctctcttttcttttagctcctctgtggtgaattaaacgtacttgag

SEQ ID NO: 749 - DNA, 233 bp, Homo sapiens
gtttttcttagtgctaataccttgcctcttattcctgctacagcagggtggtaatattggcattctgattaaatactgtgccttaggagactggaagtttaaaaatgtacaagtcctttcagtgatgagggaattgattttttttaaaagtctttttcttagaaagccaaaatgtttgtttttttaagattctgaaatgtgttgtgacaacaatgacctatttatgatcttaa

SEQ ID NO: 750 - DNA, 123 bp, Homo sapiens
gaccagcctggatagtatagctagaccttgtctctatttacaaaaaattaagaaaaaaattagctgagagtgatggtgcacgtctgtagtcccagctacccaggaggcttaggtgggtagatc

SEQ ID NO: 751 - DNA, 219 bp, Homo sapiens
ttcctgtgtccaggtgttttcatggttcaattcccacctatgagtgagaacatgcggtgtttggttttttgtccttgcaatagtttgctgagaatgatggtttccagcttcatccatgtccctacaaaggacatgaactcacccttttttatggctgcatggtattccatggtgtacatgtgtcacattttctttatccagtatatcgttgatggacat

SEQ ID NO: 752 - DNA, 257 bp, Homo sapiens
aaaagttttgagtggttcagcttttttattttttttaatggcataacttttaacaacactgctctgtaatgggttgaactgtggtactcagactgagataactgaaatgagtggatgtatagtgttattgcataattatcccactatgaagcaaagggactggataaattcccagtctagattattagcctttgttaaccatcaagcacctagagaagaattattggaaattttgtcctctgtaactggcactttgg

SEQ ID NO: 753 - DNA, 118 bp, Homo sapiens
tttgaagattagaaatttagccgtaggtaaagaatacaaaggaaaaataattttaaaatcatcaaccagatcaacaaaatatatgttaatgccgagactttgaattagagtgcgaatt

SEQ ID NO: 754 - DNA, 253 bp, Homo sapiens
taagtggattggcagactccttgttgcttaagagtggctttttaggcaggccactggcatttgaattcatcattgacaataaatgtaagaaattggaataaaaaagagagacctgctgttattcgcttttgttctccagtgatttgattaactcagggcaaggctgaatatcagagtgtatcgcactgaagaataataatccattcagtaatgttatagttatcctcaatctaaatatgtcaactgtcatttt

SEQ ID NO: 755 - DNA, 155 bp, Homo sapiens
aaggtaagccttctgctagaatgcagtttctggatggtggaaataagttctgtcatggtcctatataaaatccattttcattcacttcctatcacatttttttaaacccagaattagaatttgtatggtaattagtagttctagattctactcat

SEQ ID NO: 756 - DNA, 130 bp, Homo sapiens
accgtgaccagccaatgtgccttcttatagtgtttactcattggtctttgttctgcccagtgataacaatgggataacgcctgctacacattttcattgtgaaacccttcccctgtgctgagattaaatg

SEQ ID NO: 757 - DNA, 202 bp, Homo sapiens
taaccattgcactctttcaaaatgttaaaaataatgttgtgtttcattttaaaaaattaaataaaaactctttggaccaagcatcagttatgggaatgaatttcattccttgtttcttttgacaccaaatatcaagacattctttcccagctaggcatggtggctcatacctgtagtccttactactcggaatgctgaggtg

SEQ ID NO: 758 - DNA, 211 bp, Homo sapiens
ttgcaagcagtgcccccccatgaagaaaggagtcagttatctgctgatgggccaggtagaagagaacagaggccccgtccttcctccagagagctttgtggttctccaccggcccaaccaggaccagatcctcaccaacctaagcaagaggaagtgcccctctcaacctgtgcgggctgctgcgtcccaggactgagacgcaggccagccc

SEQ ID NO: 759 - DNA, 229 bp, Homo sapiens
tccctgaagttttacgtgccttgcaagcagtgcccccccatgaagaaaggagtcagttatttgctgatgggccaggtagaagagaacagaggccccgtccttcctccagagagctttgtggttttccaccggcccaaccaggaccagatcctcaccaacctaagcaagaggaagtgcccctttcaacctgtgcgggctgctgcgtcccaggactgagacgcaggccagc

SEQ ID NO: 760 - DNA, 126 bp, Homo sapiens
ggctggggggactaggttcctccaacccgggggggcccctacacccggccctgggctcccgattgcggtcccatcaccccctcctggcggcagaagtctcccttgcaatgtttcaggcggggacct

SEQ ID NO: 761 - DNA, 220 bp, Homo sapiens
aggccgcaccatttctgtcactcacatggacccaagataaaagaatggccaaaccctcacaacccctgatgtttgaagagttccaagttgaagggaaacaaagaagtgtttgatggtgccagagaggggctgctctccagaaagctaaaatttaatttcttttttcctctgagttctgtacttcaaccagcctacaagctggcacttgctaacaaatcag

SEQ ID NO: 762 - DNA, 164 bp, Homo sapiens
tgaggaggtcccacttgcaacttctttctgttgagagaacctcaggtacggagaagaatagaggtcctcatgggtcccttgaaggaagagggaccagggtgggagagctgattgcagaaaggagagacgtgcagcgcccctctgcacccttatcatgggatgtc

SEQ ID NO: 763 - DNA, 253 bp, Homo sapiens
aatccatgggcaatacatcttcacatgtcccttattcatatgctaagcaagttttatttttgctttttttttgcatttaaataatatttctctgaacattctgtttcagaaattgatgtttaaatttttaaaaataatttgtattgtaagaagtggctatctagctcttgaacaagtcataaaaatcctttgatgtgtgaatattcttctacctaagacctgaaatgttggcgaagtaaatatgttgttccaa

SEQ ID NO: 764 - DNA, 244 bp, Homo sapiens
aaatagcaattctttactcagaaaattctaaagggaatacttaatttgacagaactcctaataaagacattgtagccagatccagagccttccagcaagtgacactcagcaaacatttgggacagctgagagaattcaacaaagcccataccgttgtctcttgtataacatctcctagtacattcacctcagatcattgttagtcttacttagcagaaaatgtataaacacttaccaggtagta

SEQ ID NO: 765 - DNA, 294 bp, Homo sapiens
gaagacagcagctggccaggtgcagtggctcacgcctgtagttccagcactttgggaggccaaggagagtggatcacttgaggtcaggagtttgaggccagcctgcccaacatggtgaaaccctatttttactgaaaaaatacaaaaattagccagtcatggtggcaggcacctgtaatcccagctattcaggaggctgaggcagaattgcttgaacccaggaggcggaggttgcaaggagccatgatcacaccactggactccagcctgggctacagagactccatttcaaaa

SEQ ID NO: 766 - DNA, 232 bp, Homo sapiens
  misc_feature (167)..(167): n is a, c, g, or t
  misc_feature (194)..(194): n is a, c, g, or t
tgtctggttggaagaatgtggctcttggaaatatttatggctgcagtttcaactttgaatataactttaagaagctactaaagtgcctgtccgaagaataggctgaaacaaaaatataagaattattagctactttgttgggcaataggcaaaagtctatagcattntcatgaaaatatactaaaaatcatttntatgatatataaaatgtactaattagctttaaacacta

SEQ ID NO: 767 - DNA, 181 bp, Homo sapiens
  misc_feature (150)..(150): n is a, c, g, or t
ggtttggtggtcaccctgccatagctggtccctaaaccataaatgatactcatcatctctctcatccatcaccctttctaaatttctgtcttccttggttaacacttctgcttgtcaagatggcttgcctggtagaatggctcagacccntcattcctgttataaataggcccctggtcca

SEQ ID NO: 768 - DNA, 54 bp, Homo sapiens
tatggagtacagtctggcattttaatgcacatgtactacgtgtaatgaaaaata

SEQ ID NO: 769 - DNA, 112 bp, Homo sapiens
cttcactctaaaactctggtattataacttttgaaagttaatatttctacatgaaatgtttagctcttacactctatccttcctagaaaatggtaattgagattactcagat

SEQ ID NO: 770 - DNA, 212 bp, Homo sapiens
atcaggagtgtggtagtggattagtgaaagtctcctcaggaaatttgaagtctgtatattgattgagactatctaaactcatacctgtatgaattaagctgtaaggcctgtagctctggttgtatacttttgcttttcaaattatagtttattttctgtataactgatttataaaggtttttgtacattttttaatactcattgtcaatttg

SEQ ID NO: 771 - DNA, 170 bp, Homo sapiens
ccaggatgcatagcatgggtttatgaattccctatctttgcagcacatcctttatttctggcttgcatgggacttgaaagcctaaaacaactaaatgctaagaaaaattatttttaaaatgatgacaaaaatattttctatttcagatgtatagatctgcaatccagaaa

SEQ ID NO: 772 - DNA, 238 bp, Homo sapiens
agaagaaatagtgccgtcctatttatttctatatttagaaatttttttcaaagaaatttcaattgtatttatgagatgggtttttaagtatcttattgtgtgttataagtgccttttaatatcatactaagtgtgagcttctggacattttcaagagcttacaaaaactaagtggcattgtatttttataaccccattgagaagactaagtaagaaatgaaatgtcctatcaatttta

SEQ ID NO: 773 - DNA, 207 bp, Homo sapiens
taaggtttaattctgtgacagagttatgtgcagaggtacctgagcaaaaaaattatgtgggaatgcaaaattgtcccaaagatgggttccctgtaccagcaaacattatttggcattttaaagaagatggaactatttttcacccacactcaggactgtgtcttagtgcttatcggacaccggagggccgacctgatgtacaaatga

SEQ ID NO: 774 - DNA, 268 bp, Homo sapiens
ggggagatatttacattccgtactttgtaaacttgagctattggacttcactgatgtatatattaatacctcagattcctctgattttgtaagctgtcttctctgtgaacgtgtttgtgtgtgtagggcattttctgattgcacttccttaagttatgaatgtactagaaagggactcatccagaatactatgcctccctttgttaatgcttaatcatttaaagtaaacacaattgaagcctctctgaagttaaacccaactatgttt

SEQ ID NO: 775 - DNA, 284 bp, Homo sapiens
caaacttttttaggatgaagacagcttatttttaagttgtatagttttagttggtttagggtttcaattttaattaataaaatacttggtttttatttgcttgtccttttgaattcctgttttaataattttaaaatgagcacaaagaatgttgaagttcagattaattttttttgaatgatgtttttttcctctgtgatgagttgtttttgacttttttccttttgtatttgtaatgttgattaagatgtaaaataaaaagtgtgcctgattatttttgccaa

SEQ ID NO: 776 - DNA, 68 bp, Homo sapiens
ttgggaacattatctctagagtctgcttttttgtgggccagtttgtagagatgtaacatgaagccatt

SEQ ID NO: 777 - DNA, 201 bp, Homo sapiens
tgagcccatctgtgcatatctctgcacacatacacatgcatgcatgcattcctccctgtatgcccatggatgctagagctgacccttttctacagaagtcctggctaccttgacatcctactcaggtgagtgctgaaagctgatcctctgcattgtccaaaacttggattttcatccatttgcccgtgattttttatgaaa

SEQ ID NO: 778 - DNA, 202 bp, Homo sapiens
  misc_feature (89)..(89): n is a, c, g, or t
agctcaagaaataatatttggctgggcacggtggctcatacttgtagtcccagcactttgggaggccaaagcaggtagatcacttgagnccaggagtttgagaccagcttgggcaacatggtgaagccctgtctctaaaaaaacaaaagttagccaggtgtggtggcacacgcctgtagccccagctgttcaggagcctgag

SEQ ID NO: 779 - DNA, 239 bp, Homo sapiens
tgttgcaacgcctgctggtgcccttctgtctgtccacgtctgcctagggctcaggagtgcttgttctttcccttcctccctgtgtttctctttatcctgtcccctctcctttctcctggcagcagaaaaggaagaacacaagagcaaacacacaacaatgatggtggcaaagtacctgtatatagccctttcccattttttgcattatgttcttaactccttaatgtggaattttccag

SEQ ID NO: 780 - DNA, 179 bp, Homo sapiens
gagtcctgaaggcttatgcttaactactacagagtcccatgtccctgtgatgtctgcttcagctttctcccaagggtctggggaggaagtgtccacggcgctcggggttgtctgtttctagccccgccccagctggttatttctcactctgctggggagcactggtgctgtaagagatg

SEQ ID NO: 781 - DNA, 258 bp, Homo sapiens; identical to SEQ ID NO: 123

SEQ ID NO: 782 - DNA, 217 bp, Homo sapiens
gggatttgaacctgtgttcatcagagtcctgaaggcttatgcttaactactacagagtcccatgtccctgtgatgtctgcttcagctttctcccaagggtctggggaggaagtgtccacggcgctcggggttgtctgtttctagccccgccccagctggttatttctcactctgctggggagcactggtgctgtaagagatggagttgatccgtctc

SEQ ID NO: 783 - DNA, 262 bp, Homo sapiens
gcaccaagccattcaaaagagatccacccctataacccaaacacctcccatcaggcccaacctccaacattatggattacattttaacatgagatttagacaggacaaatattcaaaccatatcagcattttcgtattataaacatttataatactattatatactcttcatgaaaatcattttaatagtagctgacaacccaatgaatagaaacttagacttttagactgatttgagttgtagccttgttgattcaatgta

SEQ ID NO: 784 - DNA, 295 bp, Homo sapiens
tttgagactacagccaaatattttctaaaacctttcaagacgctccagtggatttctggatttgttcctttaaaatcaggatactctgcctttgctcagggggcagcatggcaatctgatctgcagtcagttgaagaacctgcatgatcaaagctgccttctcctgatccttgtggagtgacctggctctgcccaggactaaaactgctaggctggcttccaccttgcttgcttgccccctgtatacctcctccttgtatacctcctccctgtatactgactccttgtatgcccc

SEQ ID NO: 785 - DNA, 284 bp, Homo sapiens
aacctggccaggtgttgattaccttttagtgaataagctgagtccatatacttgtctaactaagaaagcagtacagaggaaaacaggaacctgatttttttaaaataaattttaaataaaatagaattactacaattctgcaatttcatactacctaaaaaagactagatttgaaaatgtcaagctgatttactttattcacatggagaaaagaatccacaaattaaactgagtccttcactggcatgccagttgactattattagctgtcataagtaaccccg

SEQ ID NO: 786 - DNA, 243 bp, Homo sapiens
ccattcaaaagagatccacccctataacccaaacacctcccatcaggcccaacctccaacattatggattacattttaacatgagatttagacaggacaaatattcaaaccatatcagcattttcgtattataaacatttataatactattatatactcttcatgaaaatcattttaatagtagctgacaacccaatgaatagaaacttagacttttagactgatttgagttgtagccttgtt

SEQ ID NO: 787 - DNA, 295 bp, Homo sapiens
atatttaaataattcagagaggccgggagaggtgggtcacgcctgtaatcccagcattttgggaggccaaggcaggcggatcacgagatcaggagttggagaccagcctgacaacgtggtgaaacccgtctctgctagaaatacagaaattggctgggcgtggtggcatgcacctgtatcccagctactctggaggctgaggcaggagaatcacttgggcccgggaggcggaggttgcagtgagccaagattgcaccgctgtactctagcctatgtgacggagcaagagtctgtc

SEQ ID NO: 788 - DNA, 226 bp, Homo sapiens
aacaggatttatctctgcttcattaatacatagcattaatttggcatttttattctccactttaaatagaacacgggaagacaaaataattttctttcagcaacaagaaagtaaagcagtagcaggaaatctagaaaaaaaaatccttctaaataggaattaatattttgcatcctttttttgtatttttttcctcaattagagtcctagccaataaacattcaag

SEQ ID NO: 789 - DNA, 147 bp, Homo sapiens
agctcagagctagataaccttaatttcagatcctcactctacaagtttgcttatgagcttttgtgaccactgaaatgtattttagtctctccaagactcagtttccctaacacataaaaatgggactaaaagcttcagttcagaaat

SEQ ID NO: 790 - DNA, 95 bp, Homo sapiens
tgcccggcccaacagtctcttattatttttaaagagtttgctagcaaaacttcagttttctttactttaaattttggttacaaaaccgcgtctca

SEQ ID NO: 791 - DNA, 295 bp, Homo sapiens
gaaaaggtaccttgacacctcctataataccaagtgttgcatcacccacagacacaagtaattttgacagtttccctgaggacaacgatgaaccaccacctgatgacaactcaggatgggatatagacttctaatgtatttctcttacctgcttctgccttgctgaagacagctttttctgagacacagctgccagcaaacctgagggaaagagagaagattagtgctcggggtcaccatgatgcctttgatcgatgctgctccagtaactacagtggcattaggacttatcgct

SEQ ID NO: 792 - DNA, 264 bp, Homo sapiens
tggagagcttcccagcggcgaccccccggactcaggccactggacatgctcagtggggctgtccgagcctcctagggaggggcgactggaggctggacagggttgggctcaacttagggactgaacttgcccagaacccgagctttgctggcggacgcggggacggggagaggcgggacaggggcttgtctctagggcagggatccagcctggagcgtgggggcgaggaggggagaggtttattcacagggtcactttcaaggc

SEQ ID NO: 793 - DNA, 195 bp, Homo sapiens
  misc_feature (111)..(111): n is a, c, g, or t
  misc_feature (120)..(120): n is a, c, g, or t
gtgcacatacccctgaaactgaaataaatgttaagaaaaagaatgcctggtaatttgactggcatgcagaacataatagcctgtcctgcatttgggttctgtgcagagaanattgcaccnctattagaatcaactaatataagtcatgaaaacaaaaattgatggaattaggttgaaatagactggaaaggaaat

SEQ ID NO: 794 - DNA, 67 bp, Homo sapiens
ttaaagagtttgctagcaaaacttcagttttctttactttaaattttggttacaaaaccgcgtctca

SEQ ID NO: 795 - DNA, 223 bp, Homo sapiens
gtattcttacagctatggttatttgattgtcctcttacaatttgttctacatgaaagagttctttgttagtcagaatgcaacaaactgtcatcaaatggtcattgaccacttgcactcttttgatgtagattaaaaactttttcataaatttacctgctttgatttgctctgtatttttcctgcagctgtaattgctgagtgcctgttgtatactttatagag

SEQ ID NO: 796 - DNA, 250 bp, Homo sapiens
atgaggcagagtaccgggacatccggctgatggtcatggagatccgcaatgcttatgctgtgttatatgacatcatcctgaagaacttcgagaagctcaagaagcccaggggagaaacaaagggaatgatttattgagagccctctctcccattctgtgatgagtacagcagagaccttcctgctttttactggggactccagattttccccaaacttgcttctgttgagatttttccctcaccttgcct

SEQ ID NO: 797 - DNA, 277 bp, Homo sapiens
cacaaggctagaaatggggcacagagccactggaggcctctgactgacctttactccctggccctgtaggctgtgttatatgacatcatcctgaagaacttcgagaagctcaagaagcccaggggagaaacaaagggaatgatttattgagagccctctctcccattctgtgatgagtacagcagagaccttcctgctttttactggggactccagattttccccaaacttgcttctgttgagatttttccctcaccttgcctttcaggcacaataa

SEQ ID NO: 798 - DNA, 98 bp, Homo sapiens
ttctgtgatgagtacagcagagaccttcctgctttttactggggactccagattttccccaaacttgcttctgttgagatttttccctcaccttgcct

SEQ ID NO: 799 - DNA, 219 bp, Homo sapiens
gcttttcctaggagaacgataagaaatggaaagactccttgaagtgttgcaagggaacctcctagccctgtgaaagtcagaatcgcctcagcatttccatgacgcacattatgcaaatctctttagcactattttaagtttgaaaactttaacaatgaaggggaaggggaagatttcccccaactgaatcatttgtgcacgtgtatagctcaaagagct

SEQ ID NO: 800 - DNA, 150 bp, Homo sapiens
agctcaacgggacccaggtggagtctgtacagctcaaagtcaacatagcccgaaaacagcccatgctggatgccgctactggcaagtctgtctggggctccctcgctgtccagaacagccctaagggttgccaccgggacaagaggaccc

SEQ ID NO: 801 - DNA, 101 bp, Homo sapiens
gttgtcgcagctgttttaattcaatcccacgcccctgtccagcaggaaaccccttatagaaaacccaaatcctcatcttggagtttctctttcaagtgctg

SEQ ID NO: 802 - DNA, 283 bp, Homo sapiens
gtgagaggtaacactctaaatagcccatttcatgctcaagacatccaagtcaaagaaacccaatagcacaggtgagtcccctctgttcccccccaacaccccactcacatcagggcccctgccctggagtgtcacctttattagctgtgagagacaccccagagccctgggcactgtcagtgattggggtagaacaaaaacaggacctggtcagagcccacagatgtggctagaggaactgtggggtggtgagctccctcataggctcctgaccacaatatcc

SEQ ID NO: 803 - DNA, 237 bp, Homo sapiens
gatagaaaacaacagcctacttgtgttcactgtggatgttaaagccaacaagcaccagatcaaacaggctgtgaagaagtttgtgacattgatgtggccaaagtcaacactttgattcagtctgatggagagaggaaggcatatgttcgactggctcctgactacgatgctttggttgttgccaccaaaattgggatcacctaaactgagtcaagctggctagttccaaatatatgt

SEQ ID NO: 804 - DNA, 161 bp, Homo sapiens
agccagagagctccgtctgcagcagctctttcagctccttcttgctcagcttgtacttgtccccctctttgcccgagtgggcgtggaacacgttgatgagggtctccatcgccgtctccagctcagagcccattgcagcagtgcacggttggcctgggcct

SEQ ID NO: 805 - DNA, 269 bp, Homo sapiens
agcatccacatccttttgggcctgtggtgggaggagaggaagagggaggtgtatagggaagggtacagcactgagtcagaggcaagggggtggttgaggagcaggaggcaaagatgagcgagaggaactgcattgaattatgggacttttctaggcctcctcaaaagtcttgagggcttctgttgcctacagcataagctctttcacctggcagaatgaataataatgacaccagttaccgtatgttcagtgcctataataaagcaagc

SEQ ID NO: 806 - DNA, 255 bp, Homo sapiens
tttctttttaagacttcccagcgccttggaagatcatctgccccctgccatttttcttattgcgctccttacagcttttcagctcctggctcactgttttcttttcatcactgcttctgttgttattttcagtggcttcagcatccgcacagacaattcatccaacatctgggcctttcaattttctcaactcctcatttccaaaaagatttgtcttcttacatttcagcatcccactcctctgttcatgcttta

SEQ ID NO: 807 - DNA, 272 bp, Homo sapiens
atccacatccttctgggcatccaggaagccagagagctccgtctgcagcagctctttcagctccttcttgctcagcttgtacttgtccccctctttgcccgagtgggcgtggaacacgttgatgagggtctccatcgccgtctccagctcagagcccattgcagcagtgcacggttggcctgggcctgaggtgggagcaggttctggacagatggccaaggttgcaaatgtggctgctggagctgtgtgtggagacctgtcttcaacagtcc

SEQ ID NO: 808 - DNA, 217 bp, Homo sapiens
aggatagcctcagcgtcaacgagttcaaagagctggttacccagcagttgccccatctgctcaaggatgtgggctctcttgatgagaagatgaagagcttggatgtgaatcaggactcggagctcaagttcaatgagtactggagattgattggggagctggccaaggaaatcaggaagaagaaagacctgaagatcaggaagaagtaaagccgcct

SEQ ID NO: 809 - DNA, 215 bp, Homo sapiens
gatagcctcagcgtcaacgagttcaaagagctggttacccagcagttgccccatttgctcaaggatgtgggctctcttgatgagaagatgaagagcttggatgtgaatcaggactcggagctcaagttcaatgagtactggagattgattggggagctggccaaggaaatcaggaagaagaaagacctgaagatcaggaagaagtaaagccgcct

SEQ ID NO: 810 - DNA, 71 bp, Homo sapiens
cagcctcccgactcctaggattatgggcataagctatgtttcctgctcaataagggatttttctctctttc

SEQ ID NO: 811 - DNA, 87 bp, Homo sapiens
agccgcctggctgagatggggtgggcagggcagagctgatcagggccgagcagaaccgcactcttcccaaataaagcttcctccttg

SEQ ID NO: 812 - DNA, 74 bp, Homo sapiens
gctctttcacctggcagaatgaataataatgacaccagttaccgtatgttcagtgcctataataaagcaagcac

SEQ ID NO: 813 - DNA, 236 bp, Homo sapiens
tggttagatgcgtaagcggtagtatgcgagctcagttcgttgttgctggttggctgtctagtcggccgatccgtctgctcacccggcctgccctttcctgcctttcgtctgcagcggccgccagctcctgctcggtgtccaaaacaaaatggccgccacgtccagtgcttgtctgaccggctaaaatggcgtctacacaattacgtcaggcgtcagatccgcgtaccactagagga

SEQ ID NO: 814 - DNA, 261 bp, Homo sapiens
aagactggaccaaagagcatgtgaaaaaatgggtaaatgaagaccttaagattaatgagcaatacgggcaaattctgctcagtgaagaagtaacaggattagtcctgcaggaattaactgagaaggaccttgtagaaatggggctaccatggggtccagcacttttgataaaacgttcatacaacaaattgaatagtaagtcccctgaaagtgacaatcatgatccgggacaattagataattcaaaaccgtccaaaacag

SEQ ID NO: 815 - DNA, 279 bp, Homo sapiens
gacaaccaggaacagttttaccaaggcaagtggaagctgctaggctcagtggttgcatgcctatagatggggtaaatcatcctggtgcaaatatggtattcacaccataaatgtgtagtgcaagtttcctctgtggccaatcacagggctgcaagctgaagccccagtttagcttattctccatacataacttcaaggggactttctggtgaacttttccaagaagctccaagcacagatggttcaaatttgcagtttggctagactttgtgactggat

SEQ ID NO: 816 - DNA, 228 bp, Homo sapiens
ttctcatggcactttcataacattatggctaacctctaattacagattttgcttttgcctccctgaatgaattacaagcctttttaagatatgaaatatgcctacccgcagagcttggcacaaagtggagtcaatcttttaatgttttaaatatgcattttcagactcaaataattaagaagtttcattgatatccactggtcacatcataactgtctatagggcaat

SEQ ID NO: 817 - DNA, 226 bp, Homo sapiens
gtcattcacaactgatttcaagagtcaccttcaccaggaagtcttccttgaccaccatcattcctgcctgattagagggcttcctcatggtaatatgtgttctcaagttttcagtgtcaaggaatgccatcccagaagctcattttcagatgcacaacagccagaacagtctcaagcagcattctagagcttggaatttaagaactacgcattgcctataaagtga

SEQ ID NO: 818 - DNA, 203 bp, Homo sapiens
ctgccgagcctctttggacccagatctgttcatgcttttgtcttcgtcactgcggcggggccctttgatgtcttcatctgtatggggtggaaaaatcaccgggaatcccccttcagttctttgaaaaagttccatgactcgaatatctgaaatgaagaaaacaaaccgactcacaaacctccaagtagctccaaatgcaattt

SEQ ID NO: 819 - DNA, 223 bp, Homo sapiens
gaaacgtctttagtggctttaagccccaaaacgtccctaaggcgtcctcgagatgaagacgggggggagcccccagccaggtggagaccccgcagggacgcggcggcgcccggtgaccgaggcctcgcacagccggccgccctgagggtcgggccggagccagggtccaagaggggcgcgtttgtgtctcgggttaaaataaggttccgtccgcgtgctgggt

SEQ ID NO: 820 - DNA, 268 bp, Homo sapiens
aaaaagaacaggcagggctgggcgcggtggctcacgcctgtaatcacagcacttagggaggccgaggcgggcagatcatgacgtcaggagatcaagaccatcctggctaacatggtgaaatcccatctttactaaaaatacaaaaaattagctgggcgtggtggcaggtacctgtagtcccagctacttgggaggctggcaggagaatggcgtgaacccgggaggcggagctcgccagtgagctgagatcgtggccactgaactccag

SEQ ID NO: 821 - DNA, 263 bp, Homo sapiens
tgaacccagctatgcatacaagaaaaataaattgtttgaagtgagacatgaggtaatcgagactcctcaatggggaaagtcagtgctcatctggcccctagtgtgcctgttgagctgaaatattttattgatgtgagtgcttaacaaatcaccaaatgctcagtgaatacctattatgtgtcatgagctctatgaggtagctttttttcatacagtcgtattttggcaaataaataaataatacgaggcataattgacagtga

SEQ ID NO: 822 - DNA, 201 bp, Homo sapiens
  misc_feature (36)..(36): n is a, c, g, or t
  misc_feature (48)..(48): n is a, c, g, or t
  misc_feature (75)..(75): n is a, c, g, or t
  misc_feature (112)..(115): n is a, c, g, or t
  misc_feature (124)..(124): n is a, c, g, or t
ttctgtagctgccatgagaattagttttaagatccnacaaagatcacnatgaaaggaaaaaggaaaagaattttnctcagtaagatattctgtaaacatatcatgttaactnnnncatgctagnaattttacattgctcttaggaacatcaaacctgcctggaaaatggaaataaaattcattccctattatcatcccaaa

SEQ ID NO: 823 - DNA, 234 bp, Homo sapiens
aaaatgctgttaatgtatactactggtggttgattggttttattttatgtagcttgacaattcagtgacttaatatctattccatttgtattgtacataaaattttctagaaatacacttttttccaaagtgtaagtttgtgaatagattttagcatgatgaaactgtcataatggtgaatgttcaatctgtgtaagaaaacaaactaaatgtagttgtcacactaaaatttaa

SEQ ID NO: 824 - DNA, 261 bp, Homo sapiens
ttcatcacgtactataaaattctattattacactgtttgttctcatcacaattcatatagatagtgaattaaattttcaatgggtacaagacagaaaaagcctcatgtgacatgttaggcctatttactagtatgatctttgcatgaggtttccattatatgtagggactctagcctgctctgtgctctccgtctcctccctatccacctattcatcatccttgctatcaggaagggggtctaatgttaatcatttgcatg

SEQ ID NO: 825 - DNA, 163 bp, Homo sapiens
aagaaaatttcactgccgaccatccattccttttctttattcggcataattcctcaggtagcatcctattcttggggagattttcttccccttagaagaaagagactgtagcaatacaaaaatcaagcttagtgctttattacctgagtttttaatagagcca

SEQ ID NO: 826 - DNA, 158 bp, Homo sapiens
tcttgacttccaaggctgtgtggggagatggggtgggggctcttggactgatataaaactttgtcaaatgtagttctttgaatggagcttgaaacgccgcatattcttgctcccacaaggatagtgggcatcatgaattaataaaacgtcctaggatt

SEQ ID NO: 827 - DNA, 212 bp, Homo sapiens
  misc_feature (98)..(98): n is a, c, g, or t
tctaacatacctgccgcaaattacactgcacctgttccttggcaaggtgcagcctgggattcaagttcaaggggctgcgaaacttctattactcatcnctttagatatgaaagcattttaaatgttttttttaaatccattaaaaaaaaaaaacctctgttactaattgttagttgcttcttgcagggttatatcagttcctagcttgaggt

SEQ ID NO: 828 - DNA, 224 bp, Homo sapiens
gtaatctataaaattgctatatcctcctgatagccatgggaaaacatgataagatggtcatttattttgcagttagaattttggaagccacaaaatagacagacaccctgactgttgaagggaggtttaaaaacagatattcaattgaaatgtaagagagcaccccaattgagagcccaggttacgaagacaagcttgcctcgcctgacttttctgtcccttgt

SEQ ID NO: 829 - DNA, 255 bp, Homo sapiens
ttcatcacgtactataaaattctattattacactgtttgttctcatcacaattcatatagatagtgaattaaattttcaatgggtacaagacagaaaaagcctcatgtgacatgttaggcctatttactagtatgatctttgcatgaggtttccattatatgtagggactctagcctgctctgtgctctccgtctcctccctatccacctattcatcatccttgctatcaggaagggggtctaatgttaatcatt

SEQ ID NO: 830 - DNA, 119 bp, Homo sapiens
gcattcacttccttggccagagtcaggggacagggagagagctccacactgtaaccactgggtctgggctccatcctgcgcccaaagacatccacccagacctcattatttcttgctct

SEQ ID NO: 831 - DNA, 153 bp, Homo sapiens
tcagtggaatgcacaccgataacaagctcccctctccctccttgtgccctgccccgagtggtgacttacagacaactgtcaccacttactgactgcttgcactgctgccagaactggcctaagcacttgacacacttcgtatcatttaatttt

SEQ ID NO: 832 - DNA, 244 bp, Homo sapiens
ctcctggacagggtgactccagatcagctgtttgtgagtgtgcaggatgcagctgcttatgccctggggagcctggtaaggggcagtagcaccaggagcgggagccaggaggcactgggctgcggcaagtgaggcaggggagctcactgacccaaagatttgcaccgtgtgggtctgacctcatcatgtggagtgcagagggccctgatgacatgtgtgtgatgaggaccatgacccttgaacc

SEQ ID NO: 833 - DNA, 269 bp, Homo sapiens
gaagaactcagatccctaagtaggtggggtacccctgagaggactgccacatttcattaaggaagaggggtgcctaatctattcctgacatgtctcctctcttctccaggagctcactgacccaaagatttgcaccgtgtgggtctgacctcatcatgtggagtgcagagggccctgatgacatgtgtgtgatgaggaccatgacccttgaacccccttacctaacgtaactaataaaatgaagctgagagctttggaatccaaaaaaa

SEQ ID NO: 834 - DNA, 123 bp, Homo sapiens
acccaaagatttgcaccgtgtgggtctgacctcatcatgtggagtgcagagggccctgatgacatgtgtgtgatgaggaccatgacccttgaacccccttacctaacgtaactaataaaatga

SEQ ID NO: 835 - DNA, 132 bp, Homo sapiens
gaagaactcagatccctaagtaggtggggtacccctgagaggactgccacatttcattaaggaagaggggtgcctaatctattcctgacatgtctcctctcttctccaggagctcactgacccaaagatttg

SEQ ID NO: 836 - DNA, 216 bp, Homo sapiens
ggtggctctggtcttgagcctactgtttatcttgcttctgcgcctggtggctgggcccctggtgctggtgctgatcctgggagtgctgggcgtgctggcatatggcatctactactgctgggaggagtaccgagtgctgcgggacaagggcgcctccatctcccagctgggtttcaccaccaacctcagtgcctaccagagcgtgcaggagacctg

SEQ ID NO: 837 - DNA, 208 bp, Homo sapiens
aaaattagccgagagtggtggcatgcacctgtcatcccagctactcgggaggctgaggcaggagaatcgcttgaacccgggaggcagaggttgcagtgagccgagatcgcgccactgcactccaacctgggtgacagactctgtctccaaaacaaaacaaacaaacaaaaagattttattaaagatattttgttaactcagtaaaaaa

SEQ ID NO: 838 - DNA, 86 bp, Homo sapiens
aggaagaagtgacagctccggccctgatccaggactgcaccccacccccaccgtccagccatccaacctcacttcgccttacaggt

SEQ ID NO: 839 - DNA, 78 bp, Homo sapiens
tgggtgacagactctgtttccaaaacaaaacaaacaaacaaaaagattttattaaagatattttgttaactcagtcaa

SEQ ID NO: 840 - DNA, 75 bp, Homo sapiens
tgaactagtggtgatggcttgtggcatatttagtcacagatgatgaataaatacatgcctgagactctgaggtta

SEQ ID NO: 841 - DNA, 72 bp, Homo sapiens
actagtggtgatggcttgtggcatatttagtcacagatgatgaataaatacatgcctgagactctgaggtta

SEQ ID NO: 842 - DNA, 194 bp, Homo sapiens
cctggccactcgcaagaccttttatttgaaaaccagccaagctttattcacgacacactttttcccttcactctcccacttctgtggtcaactccctggagaactcccaaaccgccgttcttttcgatagttcacgatggtgtatgagtgtcaatcatctgacccttcttggagtctcatatttcgtggaactc

SEQ ID NO: 843 - DNA, 238 bp, Homo sapiens
tagacactgaactatgctggtagcttttccattggtatatttgtctccagattagagaggcgtgtcaaggcctgaaggagcccatgtggttggataaaatcaagaaaaggtgaatgagcacggttacccccaagtggaggggtttgtacaagacatgcgcctcatcttccagaaccacagggctcttacaagtataaggattttggcaaatgggacttagactggaggtgaaatttga

SEQ ID NO: 844 - DNA, 130 bp, Homo sapiens
attagagaggcgtgtcaaggcctgaaggagcccatgtggttggataaaatcaagaaaaggtgaatgagcacggttacccccaagtggaggggtttgtacaagacatgcgcctcatcttccagaaccacag

SEQ ID NO: 845 - DNA, 255 bp, Homo sapiens
tgggaatccacagaaggtagacactgaactatgctggtagcttttccattggtatatttgtctccagattagagaggcgtgtcaaggcctgaaggagcccatgtggttggataaaatcaagaaaaggtgaatgagcacggttacccccaagtggaggggtttgtacaagacatgcgcctcatcttccagaaccacagggctcttacaagtataaggattttggcaaatgggacttagactggaggtgaaatttga

SEQ ID NO: 846 - DNA, 259 bp, Homo sapiens
aagacacctgtgaactgagtagcttggagaacatgatcagttatatcaggggtcagcaagctttttttaaaaggccggatagtaaatagttttggctttgagggccatgatgtctgtcacaactactcaattttgctgttgtactgcagaagtaacaatagatagtagtaaatgaacaggcctggctatgttccaacaaaactttatttacaaaatgagggatgcaccagatttgtccttcaagtcatagtgttttgtt

SEQ ID NO: 847 - DNA, 204 bp, Homo sapiens
cagaccatatattccgtatttcataggtgattcaaagtggggggactttttgtttgtttaactttcatttactgcacatgaatagtcatacaaaataagatgttattttaactgacttcaaattcagctgtttattttttcatttttgctgtagatatttcagtatgtatatttaaaagatagagaccctttaaaaataggccg

SEQ ID NO: 848 - DNA, 234 bp, Homo sapiens
  misc_feature (156)..(157): n is a, c, g, or t
  misc_feature (159)..(159): n is a, c, g, or t
  misc_feature (175)..(178): n is a, c, g, or t
  misc_feature (180)..(185): n is a, c, g, or t
  misc_feature (188)..(190): n is a, c, g, or t
gaatgatgccattctcacaaaccaatgctctatattgcttgaagtctgcatctaaatattgatttcacgttttaaagaaattctcttaaattacaattgtgcccaatgcagggtggctctggggggcaagtaggtggtacaggggattggaaacanncntccgcgcctccagagnnnngnnnnnnccnnngactgggtgcttatgattgggtcttggttagcccactttccctc

SEQ ID NO: 849 - DNA, 259 bp, Homo sapiens
atgcaaattatgatatggacgttatcattggtctggtgagatgtttcatatttgtgacagttaatttaaaaattatgacttaatgctgcctgtgtctatggggttctgtcttctttgatagccatctattcatctggatcatgggaccctctctaatccttccaccaatcaaataagctattgctattggtttggagttgagatatcagtctcggaaacttttgaaaaatgctaataattacccaaggattatgtcaaa

SEQ ID NO: 850 - DNA, 86 bp, Homo sapiens
atattccgtatttcataggtgattcaaagtggggggactttttgtttgtttaactttcatttactgcacatgaatagtcatacaaa

SEQ ID NO: 851 - DNA, 201 bp, Homo sapiens
  misc_feature (36)..(36): n is a, c, g, or t
  misc_feature (56)..(56): n is a, c, g, or t
ctgccccatattccgcaaatcttaacctgtggtacnaaaaaaccggattacaaccntgttcactccatatattcagcatcgtcagagaaacccaaatcagccattttacattcttcatcctaaatttatatggcagctctgggatattatccaggagaacactaaagagaagattcaaccaaacccaccatcttctggttt

SEQ ID NO: 852 - DNA, 226 bp, Homo sapiens
gcagagaggtgcacgtgtatgaatatatcccatccgtgcggcagacggagctgtgccactaccacgagctgtactacgacgcagcctgcaccctcggggcgtaccacccactactctatgagaagctcctggtgcagcgcctgaacatgggcacgcagggggatttgcatcgcaagggcaaggtggttcttcctggcttccaggcggtgcactgccctgcaccaag

SEQ ID NO: 853 - DNA, 259 bp, Homo sapiens
ctaacatttataacaaatcctgttttattctagatgaaatacttagacaattcttccagtggaaaccagtgaacttttttaacagctttgggaattcttttgtatgataatttttaaaatgaaatgtgtactcttcaaactaattaaagcttgaagttttccaggagtcgcattttaaaagtgtttgtacacattttaacacttggatattttctattttggttttgtatatttttatgtatacacaatgtacagactt

SEQ ID NO: 854 - DNA, 263 bp, Homo sapiens
cgcattgctgcctgataccttaaatgcctgatactttcgctgagcttgatccctcgtcctttgtatttggtatctaaggagaacactgagaaatcatctttaaagtggcaccacttttctatcttgtaacaaaggaactcttcctttagctttgcagaccctcctatactggaggaaggagagagatgttcatacaggaggtgaggggagacattccctgctataagcacttctttctggatccttcaattttctgggatgcg

SEQ ID NO: 855 - DNA, 299 bp, Homo sapiens
gaaccccaattaacacaggcaaggccaggtgcagtggctcctgcttgtaatcccagcactttgggaggctgaggtgggtggatcgcttcagctcaggagttttggaccagcctgggcaacatggcaaaaccccacctttacaaaaattagctgggtgtggtggtgtgcgcctgtggtcccagctactcgggaggctgacgctggagaatcacttgagcttgggaggcagaggttgctgtgagccgagattgcgccattgcattttagcctgcctgggctctgggaatgaaaccctgtct

SEQ ID NO: 856 - DNA, 69 bp, Homo sapiens
cttctagaaattttttatggctaggtatggtggctcacgcctgtggtcccggcacattgggaggcggag

SEQ ID NO: 857 - DNA, 237 bp, Homo sapiens
tcataagcgtttctacccaaagttgtgtgtggaaggagtgtatagcagagaggaaatccctttcaacagagtcagctgctaactgatttcctataagcacactggattaagggcagccacagtggtttctactgtatgtatgaaccgaatggaggaatgttttcaaagattgatttggtgtggattgcaattgtaatggaaggcataacttgggatcccgggctgtaacttgctctt

SEQ ID NO: 858 - DNA, 182 bp, Homo sapiens
ggacgggattttgccgtgtttgccaggttggccttgaactcctgacctcaggtgatccgcctgcctcgacctcccaaagtgcttggattacgggtgcaagccactgtgctgcctttagtttttgaggcagtaggatgataaaaatgtttgcccttcaggataggatacttattttagcagaa

SEQ ID NO: 859 - DNA, 195 bp, Homo sapiens
agacttcacacattaatttggtgaagaacttgacattcttttagaagacttatgatttcaatttgctaccaatgagaagaggcaaatcaacaaatttgtcaatttatgggggctataattatggtatataatgtatctgatagaaaatttgataagaaaatgtaatgaattttatcagatatccaaagtaaagga

SEQ ID NO: 860 - DNA, 249 bp, Homo sapiens
aaatgtatttactggcttttagataataaataacgggctttattgtttattttaaaagctacaatttgttttagctggtttttctgttttattaatgctttgaatttccaaatttaatatatgtagtcatgcatttaacttaatatttaattatttgatttatttaattttttatatttttacaatgtatgtatgatgtataatttaagggaaaggtatgacttttcagttttttagaatcctaggtaa

SEQ ID NO: 861 - DNA, 180 bp, Homo sapiens
gaattatgaaaagtgggcccatatgaagtaccatgttcattttgaaatatagatttaagatttagaaatatattaaaagagttaatggagcctcctaaattggattttattttgtgggtgaagaattgtaggaagatgaatgtggcctacagttttagtaatctcctagtggagtttttt

SEQ ID NO: 862 - DNA, 138 bp, Homo sapiens
tccttaggtatcaagggaagctgggcactgtggctcatgcctgtaattccagcactttgggaggctgaggcatgaggattgcttgaagccaggagtttcagaccagcctggacagcaaagcatgaccctgtctctata

SEQ ID NO: 863 - DNA, 191 bp, Homo sapiens
gtgatttctataaaccatgattacaataaataattatattaaactgtaggactttcataatggcagtagatgcctcgacctcccaaagtgcttggattacaggtgcaagccactgtgctgcctttagtttttgaggcagtaggatgataaaaatgtttgcccttcaggataggatacttattttagcagaa

SEQ ID NO: 864 - DNA, 263 bp, Homo sapiens
ttcatctcttaccaagactgttaagaagaaactagtgggattttgaacaagttatataattgtggtctgaaaagaccctaaactgaagttctgtttaaatatagttacatgaatttctctgatactaatgtactcaacagccaggtataaactatatctcctagtaacattttccatttttgtttaatcaaatacttgcttatgaaggatttcagaaatttgtaataaatgtcagcttttgatagcatagcagtaattgacat

SEQ ID NO: 865 - DNA, 230 bp, Homo sapiens
  misc_feature (75)..(75): n is a, c, g, or t
  misc_feature (205)..(205): n is a, c, g, or t
gtctgtgagaatatcaaccatagatagttctttctatattatgtttttgcttttgtattttaagctttacttagnatattcaaaacctggtatatcaagtctctgttagtactattggcatttagaagactttaccattatttcagtgctaggcattattgattaggtcttggctccactgtttacctcttgctatgtattttcncccggtaaaaatgaattgaaccatt

SEQ ID NO: 866 - DNA, 158 bp, Homo sapiens
  misc_feature (119)..(119): n is a, c, g, or t
ttctcagatcttttcagtcaaaaatctaagatgatttattttgtatcactttgttaaaagctgaatattgttaactacagttaatattaacactgtatttatactttctcaaactacanccgccccaccacttctggttgcctctgttgactattaat

SEQ ID NO: 867 - DNA, 217 bp, Homo sapiens
tccgaaagctgcgtgtctgaaaagaagggaggaagagaaggtgtcctcggagcctccccctctctccttggccggcccacaccctggaatgggagacgcatcgaatcacatgggacagatgtaaaagggtccaagttgccacattgcttcattaaaacaagagaccacttccttaacagctgtattatcttaaacccacataaacacttctccttaa

SEQ ID NO: 868 - DNA, 170 bp, Homo sapiens
gtacgtggtatttggggatgtctccaatattgctcttgtattctttctaattgggtttagtgactagttgaaggaaaatgttataacgccatttggttcacatgtgaagtgccctccatagccaaatgttgggatttttttttttttcgtttttggttggactgtttgca

SEQ ID NO: 869 - DNA, 226 bp, Homo sapiens
gcaattaatatggtaacttagctgttagactttccatcctgcgtatttgccatttggagcgtggatggaacatttcgtaatctactcagcattaaaactttgctggtattgagtttagaattccaacttttcgatggttcatgtaggtcttttcactgtcatctatcaaaacaaaacattgctttataatggaataaccacattcatttccacatatcaaaaccca

SEQ ID NO: 870 - DNA, 33 bp, Homo sapiens
taagctgcactcaattatggatgtgggaatatt

SEQ ID NO: 871 - DNA, 281 bp, Homo sapiens
taagaaatattattgtccgggcacggtggcttacacctgtaatcccagcactttaggaggctgaggcaggcagatcttttcagcccaagagttcaagaccagcctgggcaacatggtgagaccctgtctttaataaaaatagaaaaagacaaaaccctggtgtggtgatgcatgcctgtggtttgagctactcaggaggctgaagtgggaggatcccttgagccctgggggtggaggttgcagtgagctgagatcccgccgctgcattcaagactgagtga

SEQ ID NO: 872 - DNA, 296 bp, Homo sapiens
  misc_feature (58)..(58): n is a, c, g, or t
  misc_feature (65)..(65): n is a, c, g, or t
  misc_feature (68)..(68): n is a, c, g, or t
  misc_feature (84)..(84): n is a, c, g, or t
  misc_feature (89)..(89): n is a, c, g, or t
  misc_feature (96)..(96): n is a, c, g, or t
  misc_feature (115)..(115): n is a, c, g, or t
  misc_feature (247)..(247): n is a, c, g, or t
ttgccaccaaagtggttccacaagaggccctaaacaaatgagtaatcattattatttnaaaatgnccngtaagtgaaaccgatntgccnaagaccnagtaaaaatgagagcttcnttaaggaaaagagtaggaggcatacctttgtttcattttgtttgttggtttctgtgcttgctttttgttcttttctgttaggcacaggttttatttagaataaattaaatttttttttctttgatgagtgcngaaataatagttggaaacattgaatggaacagctaatgtaccatagtaa

SEQ ID NO: 873 - DNA, 215 bp, Homo sapiens
  misc_feature (159)..(159): n is a, c, g, or t
agataagtgggcagtgcttggtcctgtttctgcctcctagagagtacctctcagcatccagggatgctttagtaactcttagttaaaacgaaatgaactataattaattacctttcttttgggagggacacagagagtttcaacagcatctacaatgcntttttttttttttttgaaaagaaaatatgatagaatattaagattgacagagctgg

SEQ ID NO: 874 - DNA, 268 bp, Homo sapiens
gcagtatttctctggccagtatgaatgaagtttatacttaccatatttgatagaaacatagatcaagctatggcacagcgactcatcagatagctagctttgacgtctgggcacaattgaaccaacttccatcgtgaatctttataatgattgactttggtgtatagtgcagtaaacaaatagtgctcctagttaagtatttgtcagcatccttttgtctctaacttgtttctatttttacagccacacaattcttggcatgtattaa

SEQ ID NO: 875 - DNA, 230 bp, Homo sapiens
tttggaaaatgctagcttttttgcataacagtcactggaaaatttgagaaggctttgaagcttccagtatatagatagtctctttctttcatcctcaaaatggtaataagctgcactcaattatggatgtgggaatattttcctggtctttgggtttataggttttttatactgatgttttatttttctttaaagtaatatgggtgcacattgaccagctaagactgttt

SEQ ID NO: 876 - DNA, 114 bp, Homo sapiens
gatttgtagaagtgtccaaacaggttgtgtgctggagttccttcaagacaaaaacaaacccagcttggtcaaggccattacctgtttcccatctgtagttattcgatgaagtca

SEQ ID NO: 877 - DNA, 236 bp, Homo sapiens
gggaggtgggcgtggcggctgtggtgctggtccccatctttgccgcctttgccgtgatgaccgtggctatcctgctggtgatggagggactctcagccttcctgcacgccctgcggctgcactgggtggaattccagaacaagttctactcaggcacgggctacaagctgagtcccttcaccttcgctgccacagatgactagggcccactgcaggtcctgccagacctccttcct

SEQ ID NO: 878 - DNA, 198 bp, Homo sapiens
tttgccgcctttgccgtgatgaccgtggctatcctgctggtgatggagggactctcagccttcctgcacgccctgcggctgcactgggtggaattccagaacaagttctactcaggcacgggctacaagctgagtcccttcaccttcgctgccacagatgactagggcccactgcaggtcctgccagacctccttcct

SEQ ID NO: 879 - DNA, 294 bp, Homo sapiens
tccctcctttttagctgaggcaggtggcagggtagaaggcatggtgtaggatctgggacctcaaaagtcaaggcctggacctgagcagatctgcaataatgtcagactcttggggtgaaaaggggcagaaaagggccaaggagagatgtttccagcacattctaacttggagtgagcaaatgtcttcccaggccgggtcaggggagtgagctccccatccttggaggtgtgcacctggctgtgagcgggtgtctgggttactctctgttgggagtggtgccaatatccatgccc

SEQ ID NO: 880 - DNA, 260 bp, Homo sapiens
ggcatggtgtaggatctgggacctcaaaagtcaaggcctggacctgagcagatctgcaataatgtcagactcttggggtgaaaaggggcagaaaagggccaaggagagatgtttccagcacattctaacttggagtgagcaaatgtcttcccaggccgggtcaggggagtgagctccccatccttggaggtgtgcacctggctgtgagcgggtgtctgggttactctctgttgggagtggtgccaatatccatgccctgg

SEQ ID NO: 881 - DNA, 235 bp, Homo sapiens
  misc_feature (113)..(115): n is a, c, g, or t
  misc_feature (118)..(128): n is a, c, g, or t
aaaaagtgcccaacagttttagtgttaatcttggtgctctatggtgcattagcagagatatgaacaattaaatgaagacaaagaaaataaaaataaagtctgattaacttttnnncannnnnnnnnnnaggctcttcaaaattgctttgaatgctatggtttgcagaaaaagggtgagcatgatggctgtcctatatgtatgtaatgattttaatatgaatccttgtgtctggac

SEQ ID NO: 882 - DNA, 237 bp, Homo sapiens
tctgaacatcagtattgcagttgtggaagagcagaaggaggatacatttgtttgtgttgctccccaaaattccaccttgcatttgcatcacaaacttccctcaattgaggcagttttctttgttagaacattaagtctgtgtattgtaatagagtgggctcaatattttactataaagcatttaataaactgttattaatagaagtttgtgttcttcacacctttgctattgctttt

SEQ ID NO: 883 - DNA, 225 bp, Homo sapiens
tactgtccaatagcacctcattcccacattttattttcccccggtattctttagatcctagtatttggaaaacaatcggctaaccttgacatttctttttaccttcatatgccactatctcggtagttcaaaaaaatttagttcttgataaattgccttgaagtttaccttgtgctggagagccttatgataactccaaagactttcttacggtataatacatgt

SEQ ID NO: 884 - DNA, 254 bp, Homo sapiens
cagggtagaggttgggtgtgtgtacgggagtgtttgaggcccagtgtgttttttagggttaccccatgtaaagcacttaccgctgtgcttggaattcagcagctgtcaaaggtgcaatttcaggggcagggaacctttgaggatctgggcccgaccctcactacccctgagatattagttcccaggcctgttttcccacaggattgtgggctctttgcttccttagtcggaagtgttttcaactaatcaaataa

SEQ ID NO: 885 - DNA, 162 bp, Homo sapiens; identical to SEQ ID NO: 70

SEQ ID NO: 886 - DNA, 57 bp, Homo sapiens; identical to SEQ ID NO: 38

SEQ ID NO: 887 - DNA, 158 bp, Homo sapiens
agatccaagtcaaggcactttatgattttctgcccagagaaccctgtaatttagccttaaggagagcagaagaatacctgatactggagaaatacaatcctcactggtggaaggcaagagaccgtttggggaatgaaggcttaatcccaagcaactat

SEQ ID NO: 888 - DNA, 168 bp, Homo sapiens
attagagtttatttgttgattgtcagtagttgcgacttttaaattatatttcccccactcaaagaatggtatctttatatatcaatgacattcaataaatgtgtattatttttaatgagaatcagttacaagaggagacttgatagttcaagtagtggtttcagaaat

SEQ ID NO: 889 - DNA, 295 bp, Homo sapiens
attagagtttatttgttgattgtcagtagttgcgacttttaaattatatttcccccactcaaagaatggtatctttatatatcaatgacattcaataaatgtgtattatttttaatgagaatcagttacaagaggagacttgatagttcaagtagtggtttcagaaatgtttgggctgaatgtggtggctcatgcctataatcccagcactttgggaggccaaggtgggaagataacttgagcccagtttgagaccagcctgggcaacaaagtgagatcctatctttattacaag

SEQ ID NO: 890 - DNA, 294 bp, Homo sapiens
cctcaatatcacgtactcatggctttctaacagctgagaaatgatctgcttttcagataacaccatccagtcggttttctgttgctgctgttgctgttcagtgcagaagcggtaagtctacttccgagggcaatttcttgaaaattaattaattccgtttctttattacctgtggagtcaccatgtctctttgcacccgctgttctctctacctgggaaccttctcccattttctccctgtggaatgcctatttgtttacaggtctaggtcaaatgtcaggtcatctgggatcc

SEQ ID NO: 891 - DNA, 201 bp, Homo sapiens
aagcagtttttttgcattcgagttttaaacactgttataaaatgtagccaaagctcacctttgaacagatcccggtgacattctatttccaggaaaatccggaacctgattttagttctgtgattttacactttttacatgtgagattggacagtttcagaggccttattttgtcatactaagtgtctcctgtaattttca

SEQ ID NO: 892 - DNA, 64 bp, Homo sapiens
gggcttaaaatttagatgatggtttgatgggtgcagcaaactaccatggcacatatatatttat

SEQ ID NO: 893 - DNA, 219 bp, Homo sapiens
ggaacagaaagcccaacactgcatattctcactcataagtgggagttgaacaatgagaatatatggacacagagaggggaacatcacacaccagggcctgttgtggggtggagggcaaggggagggagagcattaggacaaatacctaatgcatgcggggcttaaaatttagatgatggtttgataggtgcagcaaactaccatggcacatatatattt

SEQ ID NO: 894 - DNA, 125 bp, Homo sapiens
caacactccattattcctctcaccccactcctgtcagagttgactttcctcccattttaccactttaaacacccccataacaattcccccatccttcagtgaactaagtccctataataaaggct

SEQ ID NO: 895 - DNA, 273 bp, Homo sapiens
gaaaactacagttgcgtgtgtaagtagatttagatgaataaaaggggggaaggagttaattactggctgttcctatagaccttttgttagagttagattccctttactttgccttcctttttgctacccaggtattcagcctggggattataaatttgaatggttttagcaacatcagctttagacctttgtcagatacaatagcaattgcgtgcaacatagactgtagtggctatctgttgtcatccatccagccatctatatatggtgcta

SEQ ID NO: 896 - DNA, 111 bp, Homo sapiens
atgaattctgaagggacgcataagacattggtattggttgcctatggggaatataattgatatgggggagacttggttttccttgtatgctcttctatatggtttaaaaaa

SEQ ID NO: 897 - DNA, 190 bp, Homo sapiens
acaaactagaaaatgcccatttatttttgttgattcaacactccagatacagattgatacatatatactaatcattttatttcatgtaaaagttttacatctagggtgcctatttatttttatagatgctttcatccagttataagcttattataactttgtaaatatttcagccaacagttgtaatgtt

SEQ ID NO: 898 - DNA, 211 bp, Homo sapiens
  misc_feature (175)..(177): n is a, c, g, or t
agttactttaattgctttatttcgttagttgtcattttattttgtactatgctggtaaactaattgtggtttagaatagttttatgttcactcctgataactgagaaacagaactaaagttttccttacattgctaaatggataaacctcatattcaataaactagtaaatgtannnacttgactgattgcgtaaatcgtgttaaaacatt

SEQ ID NO: 899 - DNA, 288 bp, Homo sapiens
ctactacagcttagagtagctgctatgggagtgtggcctttttgattaaatactagctgatcaaccctagaatataaattcttgttttataacatttagatttaaataacaataagaatgtaagctccatgaaggcaagaatgcctttttgttttgttcactgctgtgtctaaaataatgcctggctcaaatatttgttgaatgagtaaatatgctgactttgctgaagtatttaagcaagttacagatattatacaagtaaatattttgggcacaagcacacttaat

SEQ ID NO: 900 - DNA, 136 bp, Homo sapiens
aacaaaaaaacgcagtacacttaggaaggaaggtttttgtgattaagatttgattcacttttagttattaaaagaaaaggcttgctgattttcactatttaaaatgagtagcaagtgctaacacaaaatgtctgtt

SEQ ID NO: 901 - DNA, 140 bp, Homo sapiens
gaaatgctctgtagattgagttgctggaggagtgacagccaggagccctgacttcacttcctttggtccagttttactttgatacagggtggattccaaaactggctcagtacattgcatgtagttaagccacattttaa

SEQ ID NO: 902 - DNA, 274 bp, Homo sapiens
agatttaatctcacagggcatgctgggctcacgcctgtaatcccagcactttgggaggccaaggcaggaggatggcttgaggccaggagtttgagaccaacctgggcaacatggcaggaccctgtctttacaaaaaataaaaaaagttagccaggcatggtggcttacacttgtggtcccagctgcgcaggaggctgaggcagaaggatcacttgagcactagaggtggaggttgcagtgagctgagattggagtgccagtggactccagcctg

SEQ ID NO: 903 - DNA, 204 bp, Homo sapiens
agaaggaatgactctagctacaataatacccagtatgtttaagcaggttcccttggttgttgcattaaaagtaatccccctttaggtattttagagcccagaacaaccctgtgttgatttagtaggtttttatttttcctttttttttacaatgcccataatactttcctgtatttatatcataacgtgtatagtgtaaaatgt

SEQ ID NO: 904 - DNA, 157 bp, Homo sapiens
ttacctgcatgaacccatctgcataccaaaggacttattctatgaaatactttaaaaattcctcatcagcaaaggacaattcaataaatacatccaaacatgatcatcgttggagccggaggtggcaggagtcgaggcgctgatccctaaaatggcg

SEQ ID NO: 905 - DNA, 237 bp, Homo sapiens; identical to SEQ ID NO: 39

SEQ ID NO: 906 - DNA, 115 bp, Homo sapiens
  misc_feature (81)..(81): n is a, c, g, or t
ttacctgcatgaaccgtaagtggtcctttagaaagaatggactaccgtgctataacaactactagacaccttcattttacnggctgtggtatcggcagtttagggtatggagcaa

SEQ ID NO: 907 - DNA, 230 bp, Homo sapiens
ttgctctttgactgtcagcaagactgaagatggcttttcctggacagctagaaaacacaaaatcttgtaggtcattgcacctatctcagccataggtgcagtttgcttctacatgatgctaaaggctgcgaatgggatcctgatggaactaaggactccaatgtcgaactcttctttgctgcattcctttttcttcacttacaagaaaggcctgaatggaggacttttct

SEQ ID NO: 908 - DNA, 272 bp, Homo sapiens
tgaataataaaatttaagtggccaggcatggtggcttacgcctgtaatcccagctctttgggaggtcaaggcgggcggatcaactgaggtcagaagttcgagaccagcctggccaacatggcgaaaccccatctttactaaaagtacaaaaattagccgggtgtggtggcgggtgcctgtaatttcagctaatcaggaggccgaggcaggagaatagcttgaacctgggaggcagaggttgcagtgagcagagatcatgccaccccactcca

SEQ ID NO: 909 - DNA, 113 bp, Homo sapiens; identical to SEQ ID NO: 61

SEQ ID NO: 910 - DNA, 101 bp, Homo sapiens
taaaactagctttttaagcagctgtatgaaataaatgctgagtgagccccagcccgcccctgcagttcccggcctcgtcaagtgaactcggcagaccctgg

SEQ ID NO: 911 - DNA, 53 bp, Homo sapiens
aggagcggggcttgggatcggtgagactgatacagacttgacctttcagggcc

SEQ ID NO: 912 - DNA, 257 bp, Homo sapiens
ggtcaaagggtgagagggcttccttctcacccttctctccataagtatcttgaagatccatggtttgttttgctatattgtttagtttttacttgggtgcaatgtgtacgtcaaaagtttttattttgatatttgaaagagaccaaatcaggcccagaccccctctctggaaggtgttgtaggccattcaaaacgcctccggagtgtcgcaaaccaagtgcggaggggccctgaggttgtactgtaaacatcatagt

SEQ ID NO: 913 - DNA, 170 bp, Homo sapiens
tacagcatgagccatggcccctggcaaattttgtattttttgtagagacaaggttttgccatgttgcccaggctggtctcgaactcctgggttcaggcaatttatccgccagcactttgggtggattttttgagctcaggagtttgagaccaagttgggcagcatggcga

SEQ ID NO: 914 - DNA, 206 bp, Homo sapiens
tgttcaaaggttttggtgacaggctcctgagtgaagtgaagaaactagctccaaaagatgtgaagatcaggatatttgcacctcaggagagactgtattccacgtggattgggggctccatccttgcctccctggacacctttaagaagatgtgggtctccaaaaaggaatatgaggaagacggtgcccgatccatccacagaaaa

SEQ ID NO: 915 - DNA, 283 bp, Homo sapiens
tcttcaccggcaccctcacctgtgacaccaagacccaccccaatcccagacttcacacagtattttcccccacgccgtcctatgaccaaaggcccctgccaggtgtgggccacagcagcaggtatgtgtgaaagcaacgtagcgccccgcggactgcagtgcgcttaaccaactcacctcccttctcttagcccaagcctgtccctcgcacagcctcgcacaaaccacattgcctggtggggcccagtgtactgaaataaagtcgttccgatagacacgtcaa

SEQ ID NO: 916 - DNA, 284 bp, Homo sapiens
gttgagttctgtctggttttgttgccattttggtttgggaggctggaaaagcaccccaagaagctattacagagactggagtcaggagagagcaggaggccctcatgttcaccagggaacaggaccacaccggccactgaaggagggcaggagcagtcctccctctgaatggctgcagagttaatgttcccagcccagtcccctttcgggggccttgggagagtttaaggcacctgctggttccaggacctcgctttccatctgttcttgttgcaatgccatct

SEQ ID NO: 917 - DNA, 222 bp, Homo sapiens
  misc_feature (37)..(37): n is a, c, g, or t
  misc_feature (78)..(78): n is a, c, g, or t
  misc_feature (81)..(81): n is a, c, g, or t
  misc_feature (89)..(89): n is a, c, g, or t
tggggaggtggtctgccggtgccctgccccccagcantgccctacccctccactccgagctgggggggaatctgtgtntgntatgggangggggggggtagcaccacctccctgacaccctcccctgacctgactagggggaggatccaccccaacctctgccctgcccgccccaggggcaccccgacatccaggccaccccctcatggtgctacagaccct

SEQ ID NO: 918 - DNA, 265 bp, Homo sapiens
gcttaaaagtgttgggggcttctccagtttagatgggggaacaaagagaaccaacagctggaaaaaactagagatgaggccgttggcctagtcatcatccaggccgatttttcagaaccaccactttcttttcggctactttgcccatcccataaaagaaccccaaatccttcctgttcattcctcagcagttcccacgtttccttccagaaactcagaaggcaccaggaactgaattgcaaagttcgttagagcacagactctg

SEQ ID NO: 919 - DNA, 289 bp, Homo sapiens
  misc_feature (35)..(35): n is a, c, g, or t
  misc_feature (76)..(76): n is a, c, g, or t
  misc_feature (79)..(79): n is a, c, g, or t
  misc_feature (87)..(87): n is a, c, g, or t
gggaggtggtctgccggtgccctgccccccagcantgccctacccctccactccgagctgggggggaatctgtgtntgntatgggangggggggggtagcaccacctccctgacaccctcccctgacctgactagggggaggatccaccccaacctctgccctgcccgccccaggggcaccccgacatccaggccaccccctcatggtgctacagaccctgccctggggcccacacactcctgccaggaagccctacatcaataaagttctgtcttgtgtagatttcta

SEQ ID NO: 920 - DNA, 64 bp, Homo sapiens
accttgtctccaaaagaagaaataaataaataaataaatagcatggacactaattacctatgcc

SEQ ID NO: 921 - DNA, 272 bp, Homo sapiens
ggacggccctgaagagtgcaaggatgtgaacaaggtcgcctactgccccctggtgctcaaatttcagttctgcagccgagcctacttccgccagatgtgctgcaaaacctgccagggccactagggggcgcgcggcacccggagccacagctggcggggtctccgccgccagccctgcagcgggccggccaaagggggccccgggggggcgggaactgggagggaagggtgagacggagccggaagttatttattgggaacccctgcagggc

SEQ ID NO: 922 - DNA, 36 bp, Homo sapiens
aaaaactagagatgaggccgttggcctagtcatcat

SEQ ID NO: 923 - DNA, 222 bp, Homo sapiens
cagcctggaggaacatgagtagtgggcccctggcctgcaacccctttggagagtggaggtcctggggggctccccgccctccccctgttgccctcccctccctgggatgctggggcacacgtggagtcattcctgtgagaaccagcctggcctgtgttaaactcttgtgccttggaaatccagatctttaaaattttatgtatttattaacatcgccattgg

SEQ ID NO: 924 - DNA, 252 bp, Homo sapiens
aggaaacttgcaggcgagcccaacgtggtggggggccttcctccctcagaggccatggggtgagaggggttcaggcagccaaggaggcccaggcgtgctccctcttatggagcccctcccatggagctctcttcccgccgcactttttaccccgggcagaggcgcttgcccacgggacgtttggggatggacctcggcccccgcccctgcagtcagcgtcagtgctcatctacgttaataaagtggtcctat

SEQ ID NO: 925 - DNA, 269 bp, Homo sapiens
ttcaagtggtacaccagcccctggtcagagtgcaccaagacctgcggggtgggcgtgaggatgcgagacgtcaagtgctaccaggggaccgacatcgtccgtggttgcgatccgttggtgaagcccgttggcagacaggcctgtgatctgcagccctgccccacggagcccccagatgacagctgccaggaccagccaggcaccaactgtgccctggccatcaaagtgaacctctgcgggcactggtactacagcaaggcgtgctgccg

SEQ ID NO: 926 - DNA, 109 bp, Homo sapiens
gggctactttgcagccaagttcctgctgcgtttgctggactgatgtacttgtttgtgcggcaaaagtactttgtcggttacctaggagagagaacgcagagcacccctg

SEQ ID NO: 927 - DNA, 166 bp, Homo sapiens
gggttggtgttctcatctaatcaatacctacaagtcatcataattcagctcttgagagcattctgctcttctttagatggctgtaaatctattggccatctgggcttcacagcttgagttaaccttgcttttccgggaacaaaatgatgtcatgtcagctccgccc

SEQ ID NO: 928 - DNA, 130 bp, Homo sapiens
tttacgtttctgatgatggcaaagctcatttttctattagtaactctgctgaagatccatttattgcaattcatgctgaatctaaattgtaaaatttaaaattaaatgcatgtcctcaaaacaaaaaaaa

SEQ ID NO: 929 - DNA, 215 bp, Homo sapiens
aatgatgctactcaggtcagagattgtcgtctgactggtcttcttgatcttgcactggagaaggattacgtgcgttctaagattgccgaatatatgaaccatctcattgacattggtgttgcagggttcagacttgatgcttccaagcacatgtggcctggagacataaaggcaattttggacaaactgcataatctaaacagtaactggttccc

SEQ ID NO: 930 - DNA, 32 bp, Homo sapiens
cgcaatgtagtggatggccagccttttacaaa

SEQ ID NO: 931 - DNA, 177 bp, Homo sapiens
caaattgggtcattcatgtcctacgcagctaaaacagagcccaggagccagggaggaaaagcagtcaggccacacaccattgctcccaaaatggacttctctgcaagcctgactcctgaaactgtgcattgtaccctgaaaccagctttatccatagcttctgcaataaatggctgt

SEQ ID NO: 932 - DNA, 162 bp, Homo sapiens
  misc_feature (40)..(40): n is a, c, g, or t
  misc_feature (45)..(45): n is a, c, g, or t
  misc_feature (64)..(64): n is a, c, g, or t
  misc_feature (67)..(67): n is a, c, g, or t
  misc_feature (69)..(69): n is a, c, g, or t
  misc_feature (71)..(71): n is a, c, g, or t
  misc_feature (122)..(122): n is a, c, g, or t
  misc_feature (133)..(133): n is a, c, g, or t
acattcccagggctgtccagtgagtggtgttcagtgggcntcagntccaaggaatccagggggntcntntncattggggtttctctattgtgccttcagaaacccgatggaggcaatgtatncacacatattntacttccactttaaaaacctacgcaaagc

SEQ ID NO: 933 - DNA, 143 bp, Homo sapiens
gcacctgtagtttaagctgcttggaaggatgaagtgggaggattgcttgagccggggaggtggaggctgcagtgaactgagatcacgtcactgaactccagtctgagcaacagatcgagaccctgcctgaaaataaatcaata

SEQ ID NO: 934 - DNA, 243 bp, Homo sapiens
tgcgagccacctggccaggcttaggctggtcttaaactcctgacctcaagtgatccgacctccttggcctcccaaattgctgggattgctggtgtgagccacagcgcctagcccatttctcctttttataaaacctgttgctgtctctgttctcccaacatggtgaacaccacccggactgcgtgtatgtcccaaattctttctttgcaaatgaaatgtgaaattagaggctcttctccacac

SEQ ID NO: 935 - DNA, 212 bp, Homo sapiens
cccaccacatgggacagcgcaggtccagtggcctccccagctgaccgcaggcagggaacaaggcagaccctagagggccaggccacagcaggggctgaggatgcctggtgaatggatgcctgggagaatggatgccagaattcacgcatgaggctctgaacagggctgggaaaacttccaaacgaagggaagctcatgtcttggtgcacttt

SEQ ID NO: 936 - DNA, 189 bp, Homo sapiens
acctggccaggcttaggctggtcttaaactcctgacctcaagtgatccgacctccttggcctcccaaattgctgggattgctggtgtgagccacagcgcctagcccatttctcctttttataaaacctgttgctgtctctgttctcccaacatggtgaacaccacccggactgcgtgtatgtcccaaat

SEQ ID NO: 937 - DNA, 151 bp, Homo sapiens
gggactttggcatttccatagctgagcacagcaggggaggggttaatgcagatggcagtgcagcaaggagaaggcaggaacattggagcctgcaataagggaaaaatgggaactggagagtgtggggaatgggaagaagcagtttacttta

SEQ ID NO: 938 - DNA, 255 bp, Homo sapiens
atccatcctttgattttgtaattcactggaaggactcacataactcactgaaaactgctatttcacaattgtggttgatcacacagaaagaacacagattaaaatcagcctaagaaagagacacacggggcagagtttgggagggttttaagtgtgaagcttcattgtcctcaggacgctgtgttttcctgtgtgaatgtgggacaaaacacatgcggtgttgccaaccagggaagctcacccagttaaggaaaa

SEQ ID NO: 939 - DNA, 251 bp, Homo sapiens
ggaaggactcacataactcactgaaaactgctatttcacaattgtggttgatcacacagaaagaacacagattaaaatcagcctaagaaagagacacacggggcagagtttgggagggttttaagtgtgaagcttcattgtcctcaggacgctgtgttttcctgtgtgaatgtgggacaaaacacatgcggtgttgccaaccagggaagctcacccagttaaggaaaaattcctgtgaatcacattaaacc

SEQ ID NO: 940 - DNA, 243 bp, Homo sapiens; identical to SEQ ID NO: 189

SEQ ID NO: 941 - DNA, 255 bp, Homo sapiens
gtgtgatggatcccctttaggttatttaggggtatatgtcccctgcttgaaccctgaaggccaggtaatgagccatggccattgtccccagctgaggaccaggtgtctctaaaaacccaaacatcctggagagtatgcgagaacctaccaagaaaaacagtctcattactcatatacagcaggcaaagagacagaaaattaactgaaaagcagtttagagactgggggaggccggatctctagagccatcctgct

SEQ ID NO: 942 - DNA, 269 bp, Homo sapiens
tatcgcaactcaaacattccttcctattgatttccggtctttagacaaactcaaccaattgtcaaccagaaaacgtttcaatttacctgtagcctggaaacgcccactttgagttgtcccgcctttttagaccaaaccgatgtatttttcaagtgtacttaattgatgtctcatgctccctaagtgtataaaatcaagctacaccccaaccaccttgggcacatgtcatcaggacttcctgaggctgtgtcacaggcatacgtcctcaa

SEQ ID NO: 943 - DNA, 255 bp, Homo sapiens
aaagttatctctttgctcactgagatagatacatatttgattgcctcctttggaaaggctaatcagaaactcaaaagaatgcaactgtttgtgtctcacctatctgtgacctggaagctccctccccactgaaccaatgttttttttacatatattgattaatgtcttatgtctccctaaaatgtgtaaaaccaaggtatgccccaaccattttggccacatgtcatcaggacttcctgagtctgtgtcacagtg

SEQ ID NO: 944 - DNA, 61 bp, Homo sapiens
gggaggaagtctgtggtgagcaaagtttgccttattacactgataaagtgtaattacacta

SEQ ID NO: 945 - DNA, 113 bp, Homo sapiens
  misc_feature (84)..(84): n is a, c, g, or t
actaatttgacaaatcatgacactagaaaacgccaatgttttatgtctttgcccatctcaaaagctaatattgattcttctgtnccatcagctttcattgttaagtagaatat

SEQ ID NO: 946 - DNA, 183 bp, Homo sapiens
agagtcgacagagaccaacaggagccccaaacatgtattcctcttcactattggcctggacatctccacataggcagtcatatagagacttgaaatatcattcaagggatttgggtatccagtagacttttagttacatatactacaaaactgactttgtactctcaagtagacctttcgtag

SEQ ID NO: 947 - DNA, 193 bp, Homo sapiens
gctggatcttgatgcaggatcgagtcattgccgcagggattcaaagaggttactactggtactacaacaaatacatcaacgtgaagaaggggagcatctcggggctgaccatggtgctggcaggctacatgctcttccgatactgcctttcctacaaggagctcaagcacaagcggctatgcaggtaccactg

SEQ ID NO: 948 - DNA, 206 bp, Homo sapiens
tttccatggccggtggcttttccttccatgcatcactcccccccgcatgcccaggggccacccgcctggcattaccgcatgctggggtcattgggggaggggggtggggctcacgctgtcctgtggtcttgagatttttatttttgcatatgtaatccattctgtacaggtagctaactttgtaaacgctgtgtattccctctgcc

SEQ ID NO: 949 - DNA, 255 bp, Homo sapiens
tccaccctgtatcctgtgtctgagtgtgtgtgggggggttctgtactaatttccatggccggtggcttttccttccatgcatcactcccccccgcatgcccaggggccacccgcctggcattaccgcatgctggggtcattgggggaggggggtggggctcacgctgtcctgtggtcttgagatttttatttttgcatatgtaatccattctgtacaggtagctaactttgtaaacgctgtgtattccctctgcc

SEQ ID NO: 950 - DNA, 45 bp, Homo sapiens; identical to SEQ ID NO: 166

SEQ ID NO: 951 - DNA, 245 bp, Homo sapiens
caacattttggtcagatttgaacttttcaattttttgcactcaaagcttgttaagatagttaagcgtgcataagttaacttccaatttacatactttgcttagaatttgggggaaaatttagaaatataattgacaggattattggaaatttgttataatgaatgaaacattttgtcatataagattcatatttactttttatacatttgataaagtaaggcatggttgtggttaatttggttta

SEQ ID NO: 952 - DNA, 276 bp, Homo sapiens
ttgaacttttcaattttttgcactcaaagcttgttaagatagttaagcgtgcataagttaacttccaatttacatactttgcttagaatttgggggaaaatttagaaatataattgacaggattattggaaatttgttataatgaatgaaacattttgtcatataagattcatatttactttttatacatttgataaagtaaggcatggttgtggttaatttggtttatttttgttccacaagttaaataaatcataaaacttgctaactttcttg

SEQ ID NO: 953 - DNA, 296 bp, Homo sapiens; identical to SEQ ID NO: 197
  misc_feature (75)..(75): n is a, c, g, or t
  misc_feature (262)..(262): n is a, c, g, or t

SEQ ID NO: 954 - DNA, 104 bp, Homo sapiens
ttcagcaaggactggtctttctatctcttgtactacactgaattcacccccactgaaaaagatgagtatgcctgccgtgtgaaccatgtgactttgtcacagcc

SEQ ID NO: 955 - DNA, 128 bp, Homo sapiens
agtctgtacatgctcagtaaagacacaaccatccctttttttccccagtgtttttgatccatggtttgctgaatccacagatgtggagcccctggatacggaaggcccgctgtactttgaatgacaaa

SEQ ID NO: 956 - DNA, 239 bp, Homo sapiens
gcaagagtgtttggcagacgttttttggatgtgctacaggctttcctcccttgttgcttatttttattgacaaacatccctaatgtgtgtcatgtctttctctgtctctccccttccctctctttttttctcaaattatgtaacttttgaggacagttacttctgtgataaactcttcaagtaagaccgttataagatagatttggaaattaaagccccagttgcatttcagtaactca

SEQ ID NO: 957 - DNA, 259 bp, Homo sapiens
ggtatccccagattagaatgtgtttatttgggttggagtatcactgactgtggcctctctgacttcaagtgcttggtgtaattcacatgccatctcctctgtgaagcctccttgtttctcccagtgaagcaggccacctggttctctttcctctcactccattttgtgcgtgctttcactctagcacttgccataccaaagggcaattatttatctacctatctgtatctccttgtgaaatttgtgctccacaaaccaa

SEQ ID NO: 958 - DNA, 175 bp, Homo sapiens
  misc_feature (76)..(76): n is a, c, g, or t
ccaccgcgcctagccagccaattttttttttttttgtatttttagtagagacagggttttaccatgttggccaggntggtcttgaactcctgacctcaagtgatctgcctgccatggcctcccaaagtgctgggattacaggtttgagccaccatgcctgggccaatatttaatt

SEQ ID NO: 959 - DNA, 224 bp, Homo sapiens
tttctcttgatgcaatgaagggaatatgacactacagtatacagagttgttgttatatgatgcacaaaatattttgatgatttgaataaatgttaacttttaatctgcgccttaataatgactggttatctgtaaatatagaacagatacagattgtatttttctgtgggtttttgtccttttagtgatttttttccaaaaacgagagatggaattaacattga

SEQ ID NO: 960 - DNA, 293 bp, Homo sapiens
tttgaatcgccaaatgcacgcacctctttcctggaaggtggagcgagtggaaggctaccccgtcagtatcactcagacattgctagtgtcagtggccgctggtagcagcaccctcttggcacatgcccgctgactaactgtaaagtggacacaggagatgtatgaacagccttcacagcacaccatccttagcactctgggtgtctggtatcaggaccaaagcattttattcgcacctgtactttatggcaaaaaggaagaagagagagaagatgttcttatgatgtcataca

SEQ ID NO: 961 - DNA, 122 bp, Homo sapiens
tctgttctgtcagtcatggcatggctggacagaattcagggacatctatcaggcctctcaggagcaattaaattattttcatgaaggcaatttgcagttgtaaacaatattgaagacactgt

SEQ ID NO: 962 - DNA, 175 bp, Homo sapiens
ctccccaatagctaggactatggttatgtgccactaggctcagctaatttttttaggttttgtagagacagtcttgccatgttgcccaggctagtgttgaacttctggcctcaagcgatcctcctgtctcggcctctcaaagcactgggattacagggtgtgaaccactatgcct

SEQ ID NO: 963 - DNA, 264 bp, Homo sapiens
atgagaatgatggttgaaggttacattttaggaaatgaagaaacttagaaaattaatataaagacagtgatgaatacaaagaagatttttataacaatgtgtaaaatttttggccagggaaaggaatattgaagttagatacaattacttacctttgagggaaataattgttggtaatgagatgtgatgtttctcctgccacctggaaacaaagcattgaagtctgcagttgaaaagcccaacgtctgtgagatccaggaaacc

SEQ ID NO: 964 - DNA, 124 bp, Homo sapiens
ggcagcatactgagaccctgcctttaaaaacaaacagaacaaaaacaaaacaccagggacacatttctctgtcttttttgatcagtgtcctatacatcgaaggtgtgcatatatgttgaatgac

SEQ ID NO: 965 - DNA, 236 bp, Homo sapiens
atccctggatccacaggggctatcgaggagacccagtgagaatgtagcattttgttcatccccagggtagctgccctggggtctgggcactctgcctctgggagagaggaagaagaaaggggccccattttttaaaaaactgtacagagcctttggctttatgtgtttatgttcttcacatgcatatgtgtgtatgtgtgtatatctttccccccatcaattggtacaatttttaa

SEQ ID NO: 966 - DNA, 179 bp, Homo sapiens
gggtgggctgccctcttcacatggggcaccaggaacaccgtctggaacaggaaggacatcgggcaggactgacactgtgtcttgtgaaattgtttttttgttgttattttgtgttttaattttttttaatttctctctgagtgtacatacaacatactcaagcgggaccttctttctct

SEQ ID NO: 967 - DNA, 178 bp, Homo sapiens
atgccattgtgcagaccctggtcaattctgtcaattccagtatccccaaagcctgttgtgtgcccactgaactgagtgccatctccatgctgtacctggatgagtatgataaggtggtactgaaaaattatcaggagatggtagtagagggatgtgggtgccgctgagatcaggcagt

SEQ ID NO: 968 - DNA, 83 bp, Homo sapiens
gatcaggcagtccttgaggatagacagatatacacaccacacacacacaccacatacaccacacacacacgttcccatccact

SEQ ID NO: 969 - DNA, 74 bp, Homo sapiens
aaatccctaaacattcaccttgaccttatttatgactttacgtgcaaatgttttgaccatattgatcatatatt

SEQ ID NO: 970 - DNA, 277 bp, Homo sapiens
  misc_feature (243)..(243): n is a, c, g, or t
ctttccccagcatattgcaaaaagctctccagtgctaaggcattggcagggtgtgtaaacagcacccagcatatgtggaaaaataatacaaagctttttttttttcttctaatatgtctgtgcagcaagcataaataacaggacccattccaaggagtgtgtgtgggttttccccctcccctgtgtcctctgtcaccttggtgatgaggccagagtgatgtgaagactgggagggaaccctangtcagaccttggtttcctgttgttcttcccaaga

SEQ ID NO: 971 - DNA, 239 bp, Homo sapiens
gagtaaaggcataggctcctcatgacctgcagggaccccagccactgcctctgggcttggcttgagctcctgggagtcgggaagctggtttgacattttgtaggtttctctctactgtggagctggagatcaaatgattgggatggttcttcctctggccttacggaggcaaggaagtgctcttccttagtcccgtggtgttgtaaggctgagactagggagatgggtcttgtaactga

SEQ ID NO: 972 - DNA, 166 bp, Homo sapiens
ctttccccagcatattgcaaaaagctctccagtgctaaggcattggcagggtgtgtaaacagcacccagcatatgtggaaaaataatacaaagctttttttttttcttctaatatgtctgtgcagcaagcataaataacaggacccattccaaggagtgtgtgtgg

SEQ ID NO: 973 - DNA, 256 bp, Homo sapiens
tccctctgcttgtggagtggttggcattcccagcagtatcaaccctcagaggagcgggaactggggaattctggccctacgtgcattcacaggcaatgatgggtttgtgtgtatggtgtcatgagatcctctacctcataacaaaaggacagtgggtagactaaggcagtagctcaaagggctttgcaaaattttaatatattaaaacaagaggcatctgctagaaaacattctattgtataaaacccgagttctt

SEQ ID NO: 974 - DNA, 284 bp, Homo sapiens
gcatgttgaagtccccgaagcggatctgccctgtaccccctgtctccactgtcactggagatgagaacatttctgatagtgaaatagaacagtatttgcgtacccctcaggaagttagggactttcagagagcccaggctgctagacaggctgccacgagtgtccctaaccctccctgatggatatccactgggagcacttcatcctgttctgacagcttgataacattcctgttataaccaaggatggaagtgtacaccagtccgtaggtattgcttttcttg

SEQ ID NO: 975 - DNA, 278 bp, Homo sapiens
caggcattgtttatgcttccctgaaccattttgtcattggactgaactcaagactggcaagaaatgtaaaagaagccccaacagaatatgcatccatatgtgtgaggagttaagtttgtttttgactccaacagggacccctgaatgatcagcatgttgacatcattgtttgggctcaacaggatgtcaaataatatttttcaatttgagaatttttactttagaaatgttcatgttagtgcttgggttttaagggtccataggataaatgattaaaa

SEQ ID NO: 976 - DNA, 141 bp, Homo sapiens
attttcccaaatgactctacttcactattatttacatggcttatttcattagtttatagagggtttgagaaaaagaatatgtagataatttaatggtttttcacaaattttaagcttgtgattgtgctcaatgagaaggta

SEQ ID NO: 977 - DNA, 205 bp, Homo sapiens
ggttgcaaaccgcaagcgaaagtcgagaggggctggagctttccctctgatccgttttacactgtgaaaaccgcaggcctgtcgcctaggcggccacttttaaattgggaagcaaatagacgaaaaaccaaaacaaacgtacgagctgacttttcccagctaagtttcccctcaataaaaagcccgctttctgggaaagacagaa

SEQ ID NO: 978 - DNA, 212 bp, Homo sapiens
ctttcatatcaagtagcatttggagaaggcactgagctaagagacagagcacctgggttcaggacctcagatcggcatgatgtagcaaaaagagcttgcatggaatcagactggtgcagggattccaaaacagctccttcaaccaatttgtgcctcagttttcttttctgtaaaattatgactaatgatggtgctggttgttggataattaa

SEQ ID NO: 979 - DNA, 233 bp, Homo sapiens
tcaaatcggggggtgttagagcaaaaacaggcttcagaaagagtattttaccatgcttcacatggaaaaaatcgagccccggagcgatgaaaggcatattttctttgtttctccaagtttcataaccgttcagttgcagaaccaagaatctaaaaccagctctgggaaacaaatgtccagatgccagcctcatagttgaacttggatttgaaaataccttcagcacttagaag

SEQ ID NO: 980 - DNA, 158 bp, Homo sapiens
aaaaaatcatgtgggtattgcttaattctgatttcatatcattgaacactgtagatattaaaatgttcagcaggcacagttctgtaaaattgttcgtgatacattaagaatgaaagaatcaagttgtataataaggataacatcatcccacttttgta

SEQ ID NO: 981 - DNA, 77 bp, Homo sapiens
ggtaatatgtgtaacgtgcttacaaaggtgactggcacatattaggtgctcaataaagctactagttacttttactt

SEQ ID NO: 982 - DNA, 212 bp, Homo sapiens
aaggatttgagtgtctcgtttttgactaatgaagatgattcaataaacatcctgtaagaagggttcctatgtgcaagttgaggtgctactaagtacattaagacacaattgctgctctcaaggagttagcagctggtctcatgcagggatctcaccacgtggttatgtattttgtttctgatgaggtgcctttcttagcagatgctgcctta

SEQ ID NO: 983 - DNA, 193 bp, Homo sapiens
ttctttctgtgaatatctccgtgctgaccatgctggaattggatgattttgcaattcgggacctactgcaggggtccgtttagtaacgtcttgtctgtgatctttgttcttgacctctagaccccaagatgtgaacagtgcacgtgttaatgtcatctttgctcatgtgttataagccccaagttgctgtata

SEQ ID NO: 984 - DNA, 33 bp, Homo sapiens
ataacgataaatcgacttctgctgattaacctt

SEQ ID NO: 985 - DNA, 114 bp, Homo sapiens
ccctatccatgtactacatccaggaaatggctgctgcaattctctctttgctttcttgtatcttcttttccttctctttctctcattattcctctctagattattacaaacgtg

SEQ ID NO: 986 - DNA, 203 bp, Homo sapiens
ccctttaaggcctttagattttgaggtactgtaaggggcctagaaggacaaaaggctttcattcccttttccttttggcaggcaggttatcagtccttggcagaagggcccagccctatccttttctgtatcaaacaaaatccttgaggttggtatacaagttaaggctgaaaaaaggccttaaattcccagtaaagaatgtg

SEQ ID NO: 987 - DNA, 35 bp, Homo sapiens
ccctatccatgtactacatccaggaaatggctgct

SEQ ID NO: 988 - DNA, 278 bp, Homo sapiens
gtgggagatacattggatcttctcattggagaggataaagaagcaggaacagagacagttatgcggattctcttgaaaaaagtgtttgaagagaagactgaaagtgaaaaatacagagtggtgttacggcggtggaaaagtttaaagttgcctaagaagagaatgtctaaataaatggattgctttttagcaatagagctgctttctagtggtaaaggaaggggtcacctgaaaaataggacatttttattaaaataaagttctcttagcgtttgtgc

SEQ ID NO: 989 - DNA, 96 bp, Homo sapiens
ctttttagcaatagagctgctttctagtggtaaaggaaggggtcacctgaaaaataggacatttttattaaaataaagttctcttagcgtttgtgc

SEQ ID NO: 990 - DNA, 278 bp, Homo sapiens
gtgggagatacattggatcttctcattggagaggataaagaagcaggaacagagacagttatgcggattctcttgaaaaaagtgtttgaagagaagactgaaagtgaaaaatacagagtggtgttacggcggtggaaaagtttaaagttgcctaagaagagaatgtctaaataaatggattgctttttagcaatagagctgctttctagtggtaaaggaaggggtcacctgaaaaataggacatttttattaaaataaagttctcttagcgtttgtgg

SEQ ID NO: 991 - DNA, 296 bp, Homo sapiens
tgatgccctcagctcccagagagggggtgccccatctagctgggtgcaggggtcactgcttgtcagctcagggccctgtgcccgcttgcctgttcccctacatctgtgcctgcacatccagaactgcctccttgccgctgcctccaggaagcccaccttgagccagagtcaagggctgcagcactgcccgatagaacacgcccgccctcactgctgttcttgccttacagccaccatgggaaagctgcaacctttctgttttatttaaagaaagcccaacattaaagggttttcat

SEQ ID NO: 992 - DNA, 107 bp, Homo sapiens
atacagtatccaaacattggagattagtgactcacctgcagttgggagccagctacaacccaaatcattttaaaattttcaattctttgatctcatgcaatgcacac

SEQ ID NO: 993 - DNA, 246 bp, Homo sapiens
acttgagggtgatcgggaacctcccctgctgagggtggtgtcagggttccgtgactccagtgggccagtggtagcctgtcccagacaactccgtcaccccagctctgcctgtgcctttatccctgacagctgctgcactagccttcctgcttccctaaggacttagtggagggggaaagttgtttttggtactacttggtgggaagtaaggggaaggttggatcttgggtttggtctacccaccca

SEQ ID NO: 994 - DNA, 218 bp, Homo sapiens
  misc_feature (64)..(64): n is a, c, g, or t
  misc_feature (85)..(85): n is a, c, g, or t
  misc_feature (89)..(92): n is a, c, g, or t
  misc_feature (100)..(100): n is a, c, g, or t
  misc_feature (102)..(103): n is a, c, g, or t
  misc_feature (109)..(109): n is a, c, g, or t
  misc_feature (116)..(116): n is a, c, g, or t
  misc_feature (121)..(121): n is a, c, g, or t
gggcaaactcctgtgactctaacatttttcctttctcacagcaccattctgaaatttgcattgntgcttctggattttgaagccntggnnnncaagtatntnngggcangctcctnaaaanactttgtccccttaagtaagggccaggctgcttttcaggatggaaaaccattcccgactggaaaactggcgagaaccttggggagctttgacccctg

SEQ ID NO: 995 - DNA, 265 bp, Homo sapiens
aaaactagtttagccttggctttcagaagatgccagtgacaatggagtacattgccctaaagcagtattttcaaaatgtgcattgtggaatccatttggtctaagatcaaaataaatttttaatgaaacagaaaaaggtcagagtgcatcacacatatcatggataaaccagattttggtttctaataccactcccattaaaagaagccagggctccttgcagaaatagctgattccagggctagggcaggataagcacaagata

SEQ ID NO: 996 - DNA, 214 bp, Homo sapiens
ctgtcattcatgatgcggccagagcaggtttcctggacactttacagactttgctggagtttcaagctgatgttaacatcgaggataatgaagggaacctgcccttgcacttggctgccaaagaaggccacctccgggtggtggagttcctggtgaagcacacggccagcaatgtggggcatcggaaccataagggggacaccgcctgtgattt

SEQ ID NO: 997 - DNA, 260 bp, Homo sapiens
agttttgtcatatgttaagcagctaaattttttgaaactgcataagtgaaaattttacaacaggcttatgaatatatttaagcaacatttttttaacctgcaaaatttgttttaacatgtaattgcagataactttgacttttttttgaatattttatctttccttggcttttcccttgcttccccttttgccaatttcaacacccaagttgaagactttgtttttaaaatggtttgtcctgatgcttttgtttaattaa

SEQ ID NO: 998 - DNA, 113 bp, Homo sapiens
cccacctaacaagatgaatgaagttacttattctaccctgaactttgaagcccagcaacccacacaaccaacttcagcctccccatccctaacagccacagaaataatttatt

SEQ ID NO: 999 - DNA, 163 bp, Homo sapiens
taatgctctaccacaagaaaatggcctctcacctggggccattgctggcattgtgattggagtagtggccctggttgctctgatagcagtagccctggcatgttttctgcatttcgggaagaccggcagctcaggaccactccaatgacccacctaacaagat

SEQ ID NO: 1000 - DNA, 91 bp, Homo sapiens
ccaggaggattagcttggagttctctatactcaggtacctctttcagggttttctaaccctgacacggactgtgcatactttccctcatcc

SEQ ID NO: 1001 - DNA, 290 bp, Homo sapiens
aacatacagaaagaaatagtaggccgggcgtggtggctcacacctgtaaccccagcactttgggaggccaaggtgggtgcatcatgaggtcaagagattgagaccatcctggccaacatggtgaaatcccatctttactaaaaatacaaaaattagctgggcatggtggcatgcacctgtagtcccagctactcgggaggctgagacgagaatcacttgaactggggaggcagaggttgcagtgagccgagatcgagtcactgcactccagtttaagtaacaagagtgaa

SEQ ID NO: 1002 - DNA, 136 bp, Homo sapiens
gttatctccccgccacaacacatggggattatgggagctacaattcaagatgagatttgggtagggacacagccaaaccatatcagacctatagtttcttttcctttcagtccttttgaattcttcagtaaactga

SEQ ID NO: 1003 - DNA, 256 bp, Homo sapiens
cacctgcatgtactgtaaggcagaaccattccccctctctctatgaagcagcagtgttcctacactggagaacaggagagccacaaagttgtctgtattgagctgagggaagagattccatgctgaagccattccagtgaagaatcacgggacagtgtttttccctggctttcggtgacattgtggcctggcgttagatgacagtgtctgcctgaactgagagtcatcagccctggcacaagggtgtgatacagaa

SEQ ID NO: 1004 - DNA, 222 bp, Homo sapiens
gatgttaaatactgccttatgtttggcaaatttaatgaccataaaaaaacggaccacaactttcttcaaacttcttcaaagtttgcatgtctgggagaccaataaagggcagggcatacgaagtaagtctgtttaggtcagttgtttatgggtaggtgcgacttcattcctgttcgccctacttgcagacatggtaacttagaacagttcttcagaagctgt

SEQ ID NO: 1005 - DNA, 229 bp, Homo sapiens
atcagtgtggagacaagcacagcacacagacattttaggaaggaaaggaactacgaaatcgtgtgaaaatgggttggaacccatcagtgatcgcatattcattgatgagggtttgcttgagatagaaaatggtggctcctttctgtcttatctcctagtttcttcaatgcttacgccttgttcttctcaagagaaagttgtaactctctggtcttcatatgtccctgtg

SEQ ID NO: 1006 - DNA, 275 bp, Homo sapiens
ctgccaggtaagtatgtcttccatggatggtggcagacaagagaacgagggccaagcaaaaggggaaaccccttattaaaccatcagatcttgtgagacttattcactatcacagaacagtatgtggaaaccatctccatgattcagttatctccccgccacaacacatggggattatgggagctacaattcaagatgagatttgggtagggacacagccaaaccatatcagacctatagtttcttttcctttcagtccttttgaattcttcagt

SEQ ID NO: 1007 - DNA, 208 bp, Homo sapiens
agatacatggaaggtaacaggtggagggaaaacaggttttggtaggggaatatatttgttttctattgttggcataataaattagcccaaacagtggcttaaatcaaacccatctgttatcccacagttctgtaggtcagaaatcctagttggtttgtttggggtctcttcactgggtattaccaacccaaaaaaacacgtcggccag

SEQ ID NO: 1008 - DNA, 202 bp, Homo sapiens
ttctccagcagaacgaccctaccgactgcagaggtggctctagcagcacttagctcactttacttttagtttttgcaaaagtctcagaaaatgttctgattggtctagaatataagctcattcctgaagtgaccgctgagaccagggagaaaaacgtttggattggccaggccaggagacacggcataggacaaattccatc

SEQ ID NO: 1009 - DNA, 63 bp, Homo sapiens
ggaaaccacatgtagggaatgctaatggttggttcaacaggagattgtatatcaaagacatgg

SEQ ID NO: 1010 - DNA, 289 bp, Homo sapiens
tgattttcagatgacactaaagaacactttagtattgattaatcattttaaatttgtaaattgagatgaacacaattacaaaacaatacaaaattagtattttctgtttgggaaattatttttatctcctacattgttcttgtacagtgtattcaatataaacagacacagtgtttaagcttcagcttcaataatggctgatggtgatacatttgagtaattctattaccagttgaatgagggaagctgctgtgaatgcgttactgaagtaggatattagccaaaattg

SEQ ID NO: 1011 - DNA, 153 bp, Homo sapiens
aaccagttagtacaaacagtaaattaggtaactcccttatctcccccatgccccctgaaccaaatacattttcatggttacggtatcaatatattcaaatcagtggggggcctaatgcaccagcaatactcagaaaatgtaatgcaggccggg

SEQ ID NO: 1012 - DNA, 160 bp, Homo sapiens
gaaatgaatctgtcattataccagaaagttaaattttcagatcaaatgtgccttaataaatttgttttcatttagatttcaaacagtgatagacttgccattttaatacacgtcattggagggctgcgtatttgtaaatagcctgatgctcatttggaaa

SEQ ID NO: 1013 - DNA, 176 bp, Homo sapiens
taatttggaccgactaggcaaatcagaggtggagctggtgcaactggtcatcgatggagtaaactatttgattgattgtgaacggcgtctggagagaggccaggatatccgcatccccacacctgtcatccacaccaagcattaactccccatcgccagctgatgactcaagattc

SEQ ID NO: 1014 - DNA, 115 bp, Homo sapiens
tcatccatccaggatgtactaaaacagtgtgtttaataaattgtaattattttgtgtacagttttatactgttatctgtgtccatttccaaaacttgcacgtgtccctgaattcc

SEQ ID NO: 1015 - DNA, 176 bp, Homo sapiens
gttaaattaattgataccagatttcactggaacagtttcaactgataatttatgacaaaagaacatacctgtaatattgaaattaaaaagtgaaatttgtcataaagaatttcttttatttttgaaatcgagtttgtaaatgtccttttaagaagggagatatgaatccaataaat

SEQ ID NO: 1016 - DNA, 252 bp, Homo sapiens
tttcaactttccttttcctatttgaatttctttggtgctgtagaaaacaaaaaaagaaaaatatatattcataaaaaatatggtgctcattttcatccatccaggatgtactaaaacagtgtgtttaataaattgtaattattttgtgtacagttttatactgttatctgtgtccatttccaaaacttgcacgtgtccctgaattccatttgactttaattttatgagaattgcagaactttgatggcaata

SEQ ID NO: 1017 - DNA, 230 bp, Homo sapiens
tacaaccatgacatttcaacttttgatatgggcaactaacagtgacccatctgtcagtcagaagtcctcgtgggtccctctgtctgtctgctaaaagtcctcatgggtccgtctgtctgtgttctaaatgaagtacttcttttctggcctactgcaattttacaaattaccttgtagagattagatacatttgtcccctctagacagaggtaacacctgagtacagacct

SEQ ID NO: 1018 - DNA, 280 bp, Homo sapiens
ttaaaaattaggcaaagctgccagggtgtggtggctcgcacatgtaatcccaacactttgggagaccaaggcgggtggatcacctcaggtcgggagttcgagaccagcctgatcaacatggagaaaacccgtctttaccaaatatacaaaattacccaggcatggtggtgcatgcctgtaatcctagctactcgggaggctgaggcaggagaatcacttgaacccaggaggtggaggttgctgtgaaccaagattgcgcccttgcacaacaagagtgaaa

SEQ ID NO: 1019 - DNA, 202 bp, Homo sapiens
gtgacaggttgtgaatgtttttttttttgttgttgttgtttttaattgctgttaatattttttaaataataaagaaacaaaactatctgccctttcccttccagtgggttcctctggtgctgcagccagagctccctgttgccctccttttcccgtttagtcccaggaacaaaaaagggcattttgggtacaggggcatata

SEQ ID NO: 1020 - DNA, 284 bp, Homo sapiens
gcaggagaaaatggtcttcccggccccccaggtcctcaaggtcctccaggctatggcaagatgggtgcaacaggaccaatgggccagcaaggcatccctggcatccctgggcccccgggtcccatgggccagccaggcaaggctggccactgtaatccctttgactgctttggggccatgccgatggagcagcagtacccacccatgaaaaccatgaaggggccttttggctgaaattccccacctgcctttggatgaaagactccgttgggaataaatggcca

SEQ ID NO: 1021 - DNA, 245 bp, Homo sapiens
ctgggtaaataggtggtgtgtttcccaagatggggtgacttggagaggacatttatcaagcaacaatgaatttcctgtttactttactcatcactaacatagatgactgccaggcagtgcctttgatcagtgtgacggcactgagctgatgggactccagagaaaagcgaagatactggcattttgttgcagccctgttgtggctggctgcataataatttccaggaggctttcggaaatgttaa

SEQ ID NO: 1022 - DNA, 143 bp, Homo sapiens
tctgttgttagattgctgtctaattacattgcacaaccttgcctaagtttttatatacatagcattgagcttaaaaacatggaaccagctcttatgcataatttagctatatttagcatctttggtccaaagccttataaaaa

SEQ ID NO: 1023 - DNA, 273 bp, Homo sapiens
aatgaccaccgccattcacaagaactttgactgtttgaagttgatcctgagactcttgaagtaatggctgatcctgcatcagcattgtatatatggtcttaagtgcctggcctccttatccttcagaatatttattttacttacaatcctcaagttttaattgattttaaatatttttcaatacaacagtttaggtttaagatgaccaatgacaatgaccacctttgcagaaagtaaactgattgaataaataaatctccgttttcttcaatt

SEQ ID NO: 1024 - DNA, 193 bp, Homo sapiens
ctaaactggttatattttgacctgtatatcttaaatttgagtatttatatgcctaaatacatgtgtgagttttgtttgacttccaagtccaaactataagattatataagttcatatagatgaatcagaaatatgtggtaatactattaagtcacaaacactaacaatttccaactatagaaataacagttct

SEQ ID NO: 1025 - DNA, 207 bp, Homo sapiens
agtttgtgactgatatttcaagcaaaatatattttcttcatgtttcaaaattaagtgctttttctctgttgttagattgctgtctaattacattgcacaaccttgcctaagtttttatatacatagcattgagcttaaaaacatggaaccagctcttatgcataatttagctatatttagcatctttggtccaaagccttataaaaa

SEQ ID NO: 1026 - DNA, 270 bp, Homo sapiens; identical to SEQ ID NO: 66

SEQ ID NO: 1027 - DNA, 269 bp, Homo sapiens
tataaaaatttatgtaaggccgggcatggtggctcacgcctgtaatcccagcacttagggaggccagggtaggtggattacctgaggtcaggagttcaagaccagcctggccaacatggtgaaaccctgtctctattaaaaatacaaaaattagcctggcatggtggcatgtgcctgtaatcctagctattcaggaggctgaggtaggagaatcacttgaacccgggaggcggaggttgtagtgaaccaaaattacaccgttgcactcc

SEQ ID NO: 1028 - DNA, 248 bp, Homo sapiens
aggctgtggattcaaggctccctgccccccagatcatttccccaatcctggcaaaagcccaaagatcccagggtcaggagagacccctctgtatccccaggtccctcccagaactgactcctaaggtctccagccagggcttttgagatgcaaaggtttggcctcaggagagtcaccttttctcacggccctggccttaactcatattttaggcattcctggccccagggccctaataaacctgcttt

SEQ ID NO: 1029 - DNA, 229 bp, Homo sapiens
agccaaacaagagactaacctgatgtcaaactatgggagactgttgaataggcagggtttggggaaaatccagtttggtctccaatgcccaggggaagcactggcacagatgctggccctctctggaaggacttcagacagtcccaccagccccacatgtcctgctcttagggctcaattccaacacaagctagatgcgtgacctgggtcaattactgaccctccccga

SEQ ID NO: 1030 - DNA, 128 bp, Homo sapiens
ataagaaacaccaatgttttcccgtattagttcctaacgtaacatttcatgttgttaataagcacaaatctgttttcacgaccatttacttccttttcccccaaactgcaatggtgttttaatgaaca

SEQ ID NO: 1031 - DNA, 107 bp, Homo sapiens
aatgtgatctacccaatcacagtcagtgtgattattttattccaaatatctaccaaggaatgaccaggagaataagatcctccgatgttcgcaatggtgtggtgtca

SEQ ID NO: 1032 - DNA, 52 bp, Homo sapiens
cagactatataatgatacatgactgacacttgtacactaggtaataaaactg

SEQ ID NO: 1033 - DNA, 110 bp, Homo sapiens
aggggagtttatagttctgatgtctttgacattttccctggaacataccaaaccctagaaatgtttccaagaacacctggaatttggttactccactgccatgtgaccga

SEQ ID NO: 1034 - DNA, 274 bp, Homo sapiens
aaaaaccttgcctctaggccctacacctttcattcacatggaataacttactataaggaacatgagggggccatctaccctgataacaccacagattttcaaagagcagatgacaaagtatatccaggagagcagtatacatacatgttgcttgccactgaagaacaaagtcctggggaaggagatggcaattgtgtgactaggatttaccattcccacattgatgctccaaaagatattgcctcaggactcatcggacctttaataatctgta

SEQ ID NO: 1035 - DNA, 203 bp, Homo sapiens
atattactccccttagcaactgtttgttgcttatttttccttcagagttttcattgttagtctaacaatcggtcatttcacatccttaaaaccgttacgtatggaatattttaaatgcttgaagatgatagatatagtctctatcctctaagaacttacaggaaaatatggcacaaaattaccagtaacatgtccatcatgga

SEQ ID NO: 1036 - DNA, 168 bp, Homo sapiens
acattaaaacctactgctcagaaccagagaaagttgacaaagacaacgaagacttccaggagagtaacagaatgtattctgtgaatggatacacttttggaagtctcccaggactctccatgtgtgctgaagacagagtaatatggtacctttttggtatgggtaatg

SEQ ID NO: 1037 - DNA, 35 bp, Homo sapiens
ccattagaagtaagtgaaaactggccgggcgcggt

SEQ ID NO: 1038 - DNA, 231 bp, Homo sapiens
cttcatccttagcacaaagcaccttaaaaacagtaaaaggagcctctatattccagataaatatagcactgataaagcgacagctgggctgaatatcacagcatcacatgggccacgcaatcaataatttaccattagcattagcgccatggcaaaagcaaatttagacatttttaaaaggaaacagattctaggatgtacaaataaagtttctacagatatagtctttta

SEQ ID NO: 1039 - DNA, 236 bp, Homo sapiens
tcagaggataatatcaatgaactaaacttgaactaaaaattttttaaacaaaaagttataaatgaagacacatggttgtgaatacaatgatgtatttctttattttcacatacactctagctaaaagagcaagagtacacatcaacaaaaatggaaacaaggctttggctgaaaaaaacatgcatttgacaaatcatgttaatagctagacaagaagaaagttagctttgtaaact

SEQ ID NO: 1040 - DNA, 182 bp, Homo sapiens
aacagtgaactgatgttgttccttggaataaaagtcaatccccaccttaaaaaatgtatggcttctttgaggaattcttatgtcttaaagactttttacattctagacaattaaattgattgaggtcataaattaagaagtgaatagttaccactacacggtaaggtaagcagcctgaaagc

SEQ ID NO: 1041 - DNA, 245 bp, Homo sapiens
cccactgtacagagaccaagaacagaaattgtttgtaaataatgaaccttattttttattattgccaatcccctaagatattgtattttacaaatctccctcttcccttcgcccctcccttgttttatattttatgaagttagtgcgggctttgctgctccctggcccaggaaagagggactccctgaccctcacctggcacccccctgctgctgcccaagccgctgggcctttttaattgccaa

SEQ ID NO: 1042 - DNA, 277 bp, Homo sapiens
aatcacagaccacatgagactaaggagacatgtgagccaaatgcaatgtgcttcttggatcagatcctggaacagaaaaagatcagtaatgaaaaaactgatgaagtctgaatagaatctggagtatttttaacagtagtgttgatttcttaatcttgacaaatatagcagggtaatgtaagatgataacgttagagaaactgaaactgggtgagggctatctaggaattctctgtactatcttaccaaattttcggtaagtctaagaaagcaatgc

SEQ ID NO: 1043 - DNA, 230 bp, Homo sapiens
ttaactgtactacaaacacgggtcagtgcaggctgttggagccaaggctttatgttttaggttttaccgccaggcttatgtttcactttggatttcaacaatggagtgcctgtctccagggaggagaataaaagatttatgcagctacaaaaggaaagcttgtaaacatgtcctattgtcgcaagatactgatcctatatggatgccttcacggtaagcctgaccaacat

SEQ ID NO: 1044 - DNA, 133 bp, Homo sapiens
ctttaacactaaactactgtgaaattctaccagcattaagtactgtatatcgccctgtacttggataggctggctaactcgtaggaagagagcactgtatggtatccttttgctttattcaccagcattttgg

SEQ ID NO: 1045 - DNA, 146 bp, Homo sapiens; identical to SEQ ID NO: 8

SEQ ID NO: 1046 - DNA, 115 bp, Homo sapiens; identical to SEQ ID NO: 94

SEQ ID NO: 1047 - DNA, 179 bp, Homo sapiens; identical to SEQ ID NO: 15

SEQ ID NO: 1048 - DNA, 222 bp, Homo sapiens
tttcacataggttagattctcattcacgggactagttagctttaagcaccctagaggactagggtaatctgacttctcacttcctaagttcccttctatatcctcaaggtagaaatgtctatgttttttactccaattcataaatctattcataagtctttggtacaagtttacatgataaaaagaaatgtgatttgtcttcccttctttgcacttttgaaa

SEQ ID NO: 1049 - DNA, 213 bp, Homo sapiens
atttaatgaaagactgtacaaagtagaagttttagatgtatatatttcctatattgttttcagtgtacatggaataacatgtaattaagtactatgtatcaatgagtaacaggaaaattttaaaaatacagatagatatatgctttgcatgttacataagataaatgtgctgaatggttttcaaaataaaaatgaggtactctcctggaaata

SEQ ID NO: 1050 - DNA, 236 bp, Homo sapiens
ggctggttaccatcggagtttacaaagtgctttcacgttcttacttgttgtattatacattcatgcatttctaggctagagaaccttctagatttgatgcttacaactattctgttgtgactatgagaacatttctgtctctagaagttatctgtctgtattgatctttatgctatattactatctgtggttacagtggagacattgacattattactggagtcaagcccttataa

SEQ ID NO: 1051 - DNA, 261 bp, Homo sapiens
tacgctatgggatactggcaacagtgcacatatttcataaccaaattagcagcaccggtcttaatttgatgtttttcaacttttattcattgagatgttttgaagcaattaggatatgtgtgtttactgtactttttgttttgatccgtttgtataaatgatagcaatatcttggacacatttgaaatacaaaatgtttttgtctaccaaagaaaaatgttgaaaaataagcaaatgtatacctagcaatcacttttactt

SEQ ID NO: 1052 - DNA, 175 bp, Homo sapiens
gagccatatgaatgtcagtagtttatacttctctattatctcaaactactggcaatttgtaaagaaatatatatgatatataaatgtgattgcagcttttcaatgttagccacagtgtattttttcacttgtactaaaattgtatcaaatgtgacattatatgcactagcaataa

SEQ ID NO: 1053 - DNA, 287 bp, Homo sapiens
aaaaccatgtagaaaatttgttattttgcaacctcgctggactctcagtctctgagcagtgaatgattcagtgttaaatgtgatgaatactgtattttgtattgtttcaattgcatctcccagataatgtgaaaatggtccaggagaaggccaattcctatacgcagcgtgctttaaaaaataaataagaaacaactctttgagaaacaacaatttctactttgaagtcataccaatgaaaaaatgtatatgcacttataattttcctaataaagttctgtactcaa

SEQ ID NO: 1054 - DNA, 164 bp, Homo sapiens
gatgcccatgccgattcttcgaaagccatgttgccagagccaacgtcaagcatctcaaaattctcaacactccaaactgtgcccttcagattgtagcccggctgaagaacaacaacagacaagtgtgcattgacccgaagctaaagtggattcaggagtacctg

SEQ ID NO: 1055 - DNA, 200 bp, Homo sapiens
aaaagacaaagccacactggtgtgagttttcatggtccccgggaccacatcctcagaaggatccctcccacttctcctgggggttcctgcagttctgggacaggggcattccctgcagaccagacgtgaatgaagccgcttagccagcatcttgtgaacggcctgcctcatgtcctgagccacttacacatgtgtttttt

SEQ ID NO: 1056 - DNA, 216 bp, Homo sapiens; identical to SEQ ID NO: 141

SEQ ID NO: 1057 - DNA, 219 bp, Homo sapiens
aagtgctcccggaagggacccaagatccgctacagcgacgtgaagaagctggaaatgaagccaaagtacccgcactgcgaggagaagatggttatcatcaccaccaagagcgtgtccaggtaccgaggtcaggagcactgcctgcaccccaagctgcagagcaccaagcgcttcatcaagtggtacaacgcctggaacgagaagcgcagggtctacgaa

SEQ ID NO: 1058 - DNA, 196 bp, Homo sapiens
caaccttagagactcatagtgagcacaaggaaagttttgccctgagattcatggttatggctgggtaccaccaaatagaagaatggcttaggggagtgccccttcactgagatgtgtttctttgttgaactttgtgtgtgtgtgtttagaatataacagacataagaaaaaattacctaaatgaagactgtacaaa

SEQ ID NO: 1059 - DNA, 192 bp, Homo sapiens
aggaacagtgctgtatggcccgaccctgaggtctttgactctctgcgcttttccactgagaatgcatccaaacgccatccctttgcctttatgcccttctctgctgggcccaggaactgcattgggcagcagtttgccatgagtgagatgaaggtggtcacagccatgtgcttgctccgctttgagttctct

SEQ ID NO: 1060 - DNA, 300 bp, Homo sapiens
  misc_feature (161)..(161): n is a, c, g, or t
  misc_feature (170)..(174): n is a, c, g, or t
atgtcttatatcttattagcttagtagttggaaccacttagtctttaggtgcaagactgttgttagatagtactgagaaaaaaaaagtatgtgttatgagactgtacatgtttttttaaaaatagcaatatgcaataaagagatgaattcattgggtgtanaaaaaaaannnnnatgaattattaaaacagtgtcatcaaactgctttgcagtttccaccattgaatttcaattttgcaaattgttcactgaatcggaaatatatacctgtttttaaacttgtacttactggacctagaa

SEQ ID NO: 1061 - DNA, 189 bp, Homo sapiens
ttatgtagaatgtcaatcaagtttttgtatatttaaaagttggacatcaattttttcccctgatttcatcaagttatctctgccaagtgctcttgataatttcttcagatttttggaaaaaaacactatataaatgcaatccatgcttttttaaagaacaacattgccagagtatgcttgttctaacaa

SEQ ID NO: 1062 - DNA, 285 bp, Homo sapiens
gaaataacaggtgtcacttgtgcccacatttcattggccagtgcagatcacatggccacacctgagtttgcatataaggaggcatcctttttctgtagagactggtaccacaagtcatgtggccaaggctgaggtcatggggcaggcagatgacacatagtccttttttagggaggggcagtgaatcatctaccaagacagcaatcaagaagggcaataatgatgcattgacaggcagggtttcccacttaaaatgttttaaaactgaaagtctcttgttcaagt

SEQ ID NO: 1063 - DNA, 270 bp, Homo sapiens
accaaccagatgactgacagcagcagagagagaccaatcacaaaacttaatttctaattttccatgaatacttttttttagaaagctcattagcagccctctaaagtgactagaacgtttcattacactgccttgcaatccaaacagtggcaattttttccttcatctgtgagtgaatgtgtgaacgtgtgtatgtaaatgtatgtgtgtatatattaaaaaatgtatatagatgtctgagtgttgtctggagacctatacgtatggtta

SEQ ID NO: 1064 - DNA, 178 bp, Homo sapiens
tttaaggaatagacaggtggagggaaagtcacataaaggagcaagtttgtgtagctgtccctcttgccccttttaatcatcctcctttgatatggccatcctggtgggcctcctttgccatttccatttttggtttttttccctgaaaactgtgtgcaggtaattccatgtgccattg

SEQ ID NO: 1065 - DNA, 225 bp, Homo sapiens
ttctaattgtgctttacacaaattaattatattgtttgaaggtatcaaagatgaatatttatgaaattatacattaatgaaacactttcaaatgcctttcccgtccccacactgaacacagatacactcactttccaagctaaagtactggaatcatggcaatttcttccaatcagtgccagctccataattgatgagttttcacttccgttatttcatttgagt

SEQ ID NO: 1066 - DNA, 280 bp, Homo sapiens
tcttttgaccccttcctgtctggcccaaaggaagtagcaggcccagctggggcccctcggctaccccccgtctcctgccgggcaggtcccaggttggaggccctaggcgcggttcaggtcagggctatggatggggcccaggggctttggtggcccctccccaactccttcctctttgcttgggttcctttttcacgtttagtaactgtttttttttttttttttttttttttggaaagcacaaacttctgtaacgggtcgtgctcatgtctgttaataa

SEQ ID NO: 1067 - DNA, 268 bp, Homo sapiens
ctctcgttggtagttgagacgctgttgcaaattccacccctccttccctggtccagattgtagcttttagtcctccctgctcagctggccgggttggaggcctcaccctgcttggggcctggcgtggggggagctttggtgggaaaatgtcccccacctcttttcctagttttatgtttcttgggaaaatatcactttgtattctctgtccagggcttcagatattttgcacgaattttaaaacatggcaataaatggctcgtgggct

SEQ ID NO: 1068 - DNA, 281 bp, Homo sapiens
ttcttttgaccccttcctgtctggcccaaaggaagtagcaggcccagctggggcccctcggctaccccccgtctcctgccgggcaggtcccaggttggaggccctaggcgcggttcaggtcagggctatggatggggcccaggggctttggtggcccctccccaactccttcctctttgcttgggttcctttttcacgtttagtaactgtttttttttttttttttttttttttggaaagcacaaacttctgtaacgggtcgtgctcatgtctgttaataa

SEQ ID NO: 1069 - DNA, 275 bp, Homo sapiens
cctgtgttctacaacaagcctccagagatcgacatcacatgctgggatgcagacccagttccagaagaggaggagggcttcgagggtggtgattagcggtggcgccagccctaggctacccttgccaaggccgcccacctgcatcagcctctggccagacggcccgccgtgcctgcattcgcagcagctccgcctggcacccactccggattccggccctggctggggacttggccgcttccctacccacagggcctgacttttacagcttttct

SEQ ID NO: 1070 - DNA, 244 bp, Homo sapiens
attttaagctctctgacagacaagacttctttttggctggggtaagtggttttccttgaaagaagatgcaaagtcattgaatctaactttgggtcagttaacagagttaaagtcttaaaagtctgttcatattcctgaaatagttagaggtatataaaatacagagatttatatttggcttttttgttgactccttagggactaagaaatgtagctaattcatcattgtcttgtctccaaatcc

SEQ ID NO: 1071 - DNA, 227 bp, Homo sapiens
gtggcaggtccagatatgtaaaatcatttctctctattttccagctggttttgttaatgattctctaggacagcaggtaaatgagttaagttgttggcttggggcaagtgaagtttgtgactatgcttgatttaataagctgagagtctcttgtttgtctgtcaaggtgccttcctctgctgaagccttacctccttctcacccagtaacggttaactcttctcttg

SEQ ID NO: 1072 - DNA, 131 bp, Homo sapiens
ctgtgagacccccaatgctggaacaagagaggaccccactgacaccccagccacagatagtagcagggctgttcatggccacagtggcctcaaaaggcaacgaattgaattggaagatacagattcagaga

SEQ ID NO: 1073 - DNA, 168 bp, Homo sapiens
gggtgtgtacaacttaacacctggacttttactgggggagtgggaaagtgattctgtaaccaacattagaattactttggatttgtaatcagattggttttatgatttgtctttgactattcacagataattgtaaatgctggttttataagcccaagtcattttaca

SEQ ID NO: 1074 - DNA, 154 bp, Homo sapiens
aaacccataaaatgtataggattataagggaaaccaatggaaacagtttaccaaaatgctaaaaaattatgaaactaatgtgcttctttttcatgtatttaataacaagatttaaaaacaggtgtaataaactgacattttccaaatcaacttt

SEQ ID NO: 1075 - DNA, 197 bp, Homo sapiens
taagcctatacgtttctgtggagtaaatattgggattggggggaaagagggagcaacggcccatagccttggggttggacatctctagtgtagctgccacattgatttttctataatcacttggggtttgtacatttttggggggagagacacagatttttacactaatatatggacctagcttgaggcaattttaa

SEQ ID NO: 1076 - DNA, 147 bp, Homo sapiens
agtcgccatgagaacttcctaccttctgctgtttactctctgcttacttttgtctgagatggcctcaggtggtaactttctcacaggccttggccacagatctgatcattacaattgcgtcagcagtggagggcaatgtctctattc

SEQ ID NO: 1077 - DNA, 64 bp, Homo sapiens
accaaaattcaaggcacctgttacagagggaaggccaagtgctgcaagtgagctgggagtgacc

SEQ ID NO: 1078 - DNA, 32 bp, Homo sapiens
aacatacaaaacgtactggtgctttcctgcaa

SEQ ID NO: 1079 - DNA, 222 bp, Homo sapiens
aatgaggacaactagcatttgtacagggcttcacagtttacaaagcgctttctcatacattatcacatttgatcctcccagggccctgccaggttgttttgcatatgtgcattttaatttcaaaaagtcttccttccaagcgtgtatgatgaaatgagtaaattgattaattggcgtaacttattttgcatggatccaacctaatgttcatgcaggatagag

SEQ ID NO: 1080 - DNA, 32 bp, Homo sapiens
agaaaagaaaagggccaggcgtggtggctcac

SEQ ID NO: 1081 - DNA, 291 bp, Homo sapiens
gcaaagtgaggaccattactacgaggtcaaactccataaagcagggcaaagaccagcattttcctgtcttcatgaatgagaaagaggacatcttatggtgcactgaaatggaaagggtatttggtttcccagtccactatactgacgtctccaacatgagccgcttggcgaggcagagactgctgggccggtcatggagcgtgccagtcatccgccacctcttcgctccgctgaaggagtattttgcgtgtgtgtaagggacatgggggcaaactgaggtagcgacacaaa

SEQ ID NO: 1082 - DNA, 234 bp, Homo sapiens
agaatagaagaatgggccaggcgcagtggctcacacctgaatcccagcactgtgggaggccaaggcagatggatcacttgaggtcaggagttggagaccagcctggccaacatggcaaaaccccgtctttactaaaaatacaaaaattagcccagcgtggtggtgcgtgcctgtaatcacagctacttgggaagctgaggtgggagaattacttgaacctggtaggtggaggtt

SEQ ID NO: 1083 - DNA, 299 bp, Homo sapiens
gcatggtcacataggaggattacaggtgtgagccaccgcgcccggccgataatgtgttgttttaaggcattaattttgtggtacatacaaaaagtaatttgtgtgtacatacatgcatatatacatatatatgtacacacacatatatttgtttaacctacacacagtgtttattttatttatttcgataaaactattattcaccagctgagccttgtggtgcactgtaatagtttcttttcgtttttttttccctgaagataataaataacctggtttctccatctgcctaatttttt

SEQ ID NO: 1084 - DNA, 197 bp, Homo sapiens
acagctgagagtgggattcatccagactcatgcaataaccctttgattgttttttaaaaggagactccctcggcaagatggcagagggtacggagtcttcaggcccagtttctcactttagccaattcgagggctccttgtggtgggatcagaactaatccagagtgtgggaaagtgacagtcaaaaccccacctgg

SEQ ID NO: 1085 - DNA, 143 bp, Homo sapiens
ctggtcacgcaaaacagaacccagttagcagcagggagacgagaacaccacacaagacatttttttacagtatttcaggtgcctaccacacaggaaaccttgaagaaaatcagtttctagaagccgctgttacctcttgttta

SEQ ID NO: 1086 - DNA, 239 bp, Homo sapiens
gcatggtcacataggaggattacaggtgtgagccaccgcgcccggccgataatgtgttgttttaaggcattaattttgtggtacatacaaaaagtaatttgtgtgtacatacatgcatatatacatatatatgtacacacacatatatttgtttaacctacacacagtgtttattttatttatttcgataaaactattattcaccagctgagccttgtggtgcactgtaatagtttctt

SEQ ID NO: 1087 - DNA, 300 bp, Homo sapiens
atcaaaatccattcatggctgggcacagtggctcacgcctttaatcccaggactttgggaggccgaggcgggtggatcacctgaggttaggagtttgagaccagcctggccaacatggcaaaatcccatttttactaaaaatgcaaaaattagccgggcatggcggcgggtgcctgtaatcccagctactcgtgaggctgaggcaagagaattgcttgaacccacaaggcagaggttgtggtgagccgagaatgcgccactgcactccagcctgggctagagagcaagggtccatctcaa

SEQ ID NO: 1088 - DNA, 243 bp, Homo sapiens
aggagcgaaaggaggaggcctagtttgggccgatgtattttaaagcagagtggacagcagagagtcaatttccctttcgttgggagtgggcagtggggtggctaattgtcttcggccaaccaggggcctgttgcccaggcaactcaccagctccgcctctgctgattggctgccacggtgggagtcagccaagatttaaagggatgccagcgattgctcttttcaaaacctaccagtcccact

SEQ ID NO: 1089 - DNA, 264 bp, Homo sapiens
gcactgagtcgagatcccccccctgcactccagcctgggtgacagagcaagactccatcacaaaaaaaaaaacaggcaggccaagcgcagtggtgcacacctgtaatccctgcacttggggaggccgaggtgggaggatcacttgaggccaggagtttgagaccaatttgggcaacatagtgagacttggagaggctgatgtgggacgattgttggagcccaggagttcgaggctgcagtgagctctggttgcactgctgcact

SEQ ID NO: 1090 - DNA, 283 bp, Homo sapiens
tgcttggcccttgacacatataatttcacggaatcctcacagcagattaaaaaaaaaaaaaggtaccatattgtccccattttacagaccaccccttacaagagatgagatgatgtgctgtgtgtcgcccagctcattagtggttgaactgagatatgaaagcagctctggctgactccaaaagccaaagctcttttgagggccagaggaagaggagagtcaggataccttttcctaggggctcttcatttgaagagaggatagtaccttgtcacagaaactg

SEQ ID NO: 1091 - DNA, 178 bp, Homo sapiens
agcagccatacctatgggacacacactacgaaaaggatgcctttagggtttgggggagattttactcctttcttcaacaactattcactggacaagttctctgctcccatgacgcgccaggcacagttctgcaagtatattgtgaatgtattgttctagtgggatacacaaataagtc

SEQ ID NO: 1092 - DNA, 271 bp, Homo sapiens
tagggtggaggtcactgcactaccacccacctctggaagactggctgtgaaaagtcaggtggcagaaacctggggccacatagagcctctctcttttcctgtttcttggctctagaagatcagcactgcactgttagctgagagtgcgggcaagacataaactgtccagagtttgaaggttctcggaaagaccggagggcttctccccacagaaggcggagagagctggggctcagacatgggtgtgcaccttaataaaccctgctgtctg

SEQ ID NO: 1093 - DNA, 271 bp, Homo sapiens
ctggcatgtggagttacagagggatccctcatgccactgctgccaccaccttttcctggggcatccaaaggccagctggcctcatttaatttggaagggagtgacttgttagttccaggcctcctttagttttgaggcagctagaccagggataggagtgggcaacttgccaagcccttaactttacttcctcttcagtctgtggtactcctcctaaccctaaaccctctatgctcaggggctggaactggggaatggagtaagtcacctt

SEQ ID NO: 1094 - DNA, 258 bp, Homo sapiens
ttacagagggatccctcatgccactgctgcccccaccttttcctggggcatccaaaggccagctggcctcatttaatttggaagggagtgacttgttagttccaggcctcctttagttttgaggcagctagaccagggataggagtgggcaacttgccaagcccttaactttacttccttttcagtttgtggtactcctcctaaccctaaaccctttatgctcaggggctggaactggggaatggagtaagtcacctt

SEQ ID NO: 1095 - DNA, 259 bp, Homo sapiens
caccagatgagttaggaataaacctataacatttacaaaaagagcaaaactaagtgatagaaaatatttcacacatgttcttatagatcatgtatcacttgcaagttttaggagttcatatcctatatcatttcaaattaagtacataataaagtaaaattttgaaatgaacactttaggtatttttgccaagatttagatgtttttaattaaacttttctcttcctttttttttcactaaggcatgtttattccccta

SEQ ID NO: 1096 - DNA, 244 bp, Homo sapiens
gcagggcaatcctggggctaaatgaggtacaggggaatggactctcccctactgcacccctgggagaggaagccaggcaccgatagagcacccagccccacccctgtaaatggaatttaccagatgaagggaatgaagtccctcactgagcctcagatttcctcacctgtgaaatgggctgaggcaggaaatgggaaaaagtgttagtgcttccaggcggcactgacagcctcagtaacaataa

SEQ ID NO: 1097 - DNA, 218 bp, Homo sapiens
ctgaacacgtcggaacatcagaaagaacaaactccagatgcgccacctgaagagctgtaagactcaccgcgagggtccgcggcttcattcttgaagtcagtgagaccaagaacccaccagttctggacacattatcacctcctcaccccagagctgcatacctggcttaggagggactgtcgaaatgaatttatccaggccctcattttgcagagaag

SEQ ID NO: 1098 - DNA, 270 bp, Homo sapiens
tagtgttgggacaatgggtgtccacatgcaaaagaataaagttgtccccttaccttacaccatctccaaaaattaactcaaaatatgtcaaagacataaacgtaagagctaaaactgtaaaactcctagaataaaacataggagtaaatcttcatgaccttggattaggccattgtgtcttaaatataacaccaaaagaataagtaataaaaaaatagataaattgaactccatcaaaattaaaagcctttgtgcttcataggacaccat

SEQ ID NO: 1099 - DNA, 96 bp, Homo sapiens
ctttgactcccaactacggtagcattatggacatctcacaatgtcaagggtttctgttatgtattagtaaagtatagattattggggcctacataa

SEQ ID NO: 1100 - DNA, 225 bp, Homo sapiens
ctaaatgcaaggttgacggagaacagcttgtctggcacaacaatggtgcaggcccacgagccagcatcacagcttggccatgggacgttgagtatgcacaaactagaactcttcccttcccaccttaggaatagaaaatcctcttcctttctaatctgaaaaacgaaaactgaacaaacacaaaaccaaccccttggcagttcccacctcctattgacatatgga

SEQ ID NO: 1101 - DNA, 138 bp, Homo sapiens
tcaaaatatctcatgacgccaggtgcggtggctcacgcctataatcccagcactttgggaggccgaagtgggcagatcatctgaggtcaggagttcaagaccagcctggccaacacggcaaaaccccgtttctgctaa

SEQ ID NO: 1102 - DNA, 155 bp, Homo sapiens
aaaaaaagtataaacatatccacatatttttatttttttctctttttttgacagagtctcgctttttcacccaggctggagtacaatggcacaatcttggctcaccgcaacctccgcctcccaggagaatcgcttggacccaagagatggaggtt

SEQ ID NO: 1103 - DNA, 197 bp, Homo sapiens
  misc_feature (149)..(149): n is a, c, g, or t
cagccgatgcccctttggactcgatcttggagggtgcagcccgcctgccacggggtgttggatatggaggaggatggagcggaagccccctgggggagcctgcagtcctgcgttgcacttgtcattgtgtttctcccaggaccaccccnaaaaagaaaagctctcacgttgctccaccaataaacgtttcgatcttt

SEQ ID NO: 1104 - DNA, 250 bp, Homo sapiens
tgtttatttaaaagagcaggccaggcgcggtggctcacgcctgtaatcccagcactttgggaggctgaggcgggtggatcacgaggtcaggagatcgagaccatcctggctaacacggtgaaacccgtctctactaaaaatgcaaaaaaaattagccgggcgtggtggcaggcacctgtagtcccagctactcgggaggctgaggcaggagactggcgtgaacccaggaggcggaccttgtagtgagccg

SEQ ID NO: 1105 - DNA, 190 bp, Homo sapiens
tgtaagtagaagctagcactggttttattaatttagtgactattcattttatctaaatcagtgaagatttactgtcattgtttattagtctgtatatattaaaatatgatatcattaatgtacttacaaaatagtatgtcactgtttttatgttcattcttaaaaacataacctgtattaataaatgtga

SEQ ID NO: 1106 - DNA, 288 bp, Homo sapiens
gaaaagcagtcatcctgatggctctggctccagaggacctgagactcacactttttgcagcccagcctagtcagggcacagctgccctgctgccacagcaaggaaatgtcctgcatggggcagaggcttccgtgtcctctcccccaaccccctgcaagaagcgccgactccctgagtctggacctccatccctgctctggtccccttttttcgtcctgatccctccacccccatgtggcagcccatgggtatgacataggccaaggcccaactaacagtcaagaaaca

SEQ ID NO: 1107 - DNA, 166 bp, Homo sapiens
ctttttcatgttgttgctataggaaggacaagaaagaagattgttaagatcaacgaacttcatgaaaaaggaagtaaactttgtatttatgccttgaagggtgagactattgaaggagccttatgcaaggatggccgttttcggtctgacataggtgaatttgaat

SEQ ID NO: 1108 - DNA, 246 bp, Homo sapiens
aagccaagtaccacatgttctctcataagtggaagctaaatattgagtacacatggacacaaagaagaaaacaacagatatggggcctacttgagggtggagggtgggaggagggtgaagactgaaaaactgcctatggggtactatgcttattacctgggtgatgaaataatctgaacacaaaaccctggtgacatgcagtttacctatataacaaaactgcacatggactcttaaacctaaata

SEQ ID NO: 1109 - DNA, 75 bp, Homo sapiens
gaaataatctgaacacaaaaccctggtgacatgcagtttacctatataacaaaactgcacatggactcttaaacc

SEQ ID NO: 1110 - DNA, 254 bp, Homo sapiens
gggaatgatgtgattcaagctggaaagagggttgggagaaacagcttgtccaggtggagctatgttatgatcagatcgaagtgtgacccctgtgtggtccagacagccctgcagagagaaaacctttattccattatcaccaagcacctcctagtttccgacagtcatctccttctgctgggagaattagcagcagttcagggggcttatgttatgtccttgttcaactcaacttgagctcttgaactcctcct

SEQ ID NO: 1111 - DNA, 140 bp, Homo sapiens
acaacagatattctggctggcctgcagagatccagatagaaggctgcatacccaaagaacgaagctgacactgcagggtcctgagtaaatgtgttctgtataaacaaatgcagctggaatcgctcaagaatcttattttt

SEQ ID NO: 1112 - DNA, 261 bp, Homo sapiens
tcagagactcatgtttaatacataggtgatttgtacctcagagcattttttaaaggattctttccaagcgagatttaattataaggtagtacctaatttgttcaatgtataacattctcaggatttgtaacacttaaatgatcagacagaataatattttctagttattatgtgtaagatgagttgctatttttctgatgctcattctgatacaactatttttcgtgtcaaatatctactgtgcccaaatgtactcaattt

SEQ ID NO: 1113 - DNA, 244 bp, Homo sapiens
gtggcctttggtgacctcaccactccctcccacccagtccctccctttggtccactgccttttcatatgtgttgtttctggagacagaagtcaaaaggaagagcagtggagccttgcccacagggctgctgcttcatgcgagagggagatgtgtgggcgagagccaatttgtgtgagtggtttgtggctgtgtgtgtgactgtgagtgtgagtgacagatacatagtttcattggtcatttttt

SEQ ID NO: 1114 - DNA, 264 bp, Homo sapiens
tagaagaaaaatggggccgggtgccctgtaatcccagcattttgggaggctgaggcaggtggatcacctgaggtcaggagttcgagaccaccctggccaacatggtgaaaccccatttttactaaaaatacaaaaattagccaggcatggtggcaggtgcctgtaatcccagctactcaggaggctgaggcaggagaatcacttgaaccagggaggcaaaggttgcagtgagccaagattgtgccattgccctctggcctgggt

SEQ ID NO: 1115 - DNA, 179 bp, Homo sapiens
gctggtctgccgcacagccgcaggtgcacctccaggccaaatcattgctgccagtgactgtggtctgtacttgtttataccctcagacttttttaatgttaggtatttgtagcattaggccaacatgtattaagctgagccagatgaataagtccatctgatgtattttcggtgtttaa

SEQ ID NO: 1116 - DNA, 262 bp, Homo sapiens
gggccttgctccgaaagcctagagaccgccactgtgattcacctatgggggcctgccaaaggctgcagccagcatccttatctgccactgacacctcaagcaacattggatctgctgggtcatatggcccaagtggcagagcaacttgcacaacagcctggacctgtcatagagctttctcctgttctggaccccactcaaaactggcagcctttcaggtcactcgataaatgtgctggagtaacactcaaacgaggaatgt

SEQ ID NO: 1117 - DNA, 210 bp, Homo sapiens
gctgctgtagaatagcacagacgtggatgataaattatccccagaagcagcatgacagaatgcctcggggagcacttggaagggaaattgcagttctgttgaaatagaggaaaatcccttggtaaagacacagcctgttaggctcgtgtgggcctccagtatgttcaccaggggaatggctgggatttctcggcactctgcatcatccat

SEQ ID NO: 1118 - DNA, 257 bp, Homo sapiens
ttgtggctttagcatgtgccatgctgtccccctgcagactgccattctccttgcagacttggctcagaagtcacctcctcagtgcagttagcctgagctcccctggccccaggtgcctccatcagagcatttaccccattgtgttgtggctgttccttaacgtccccactagccaggctctttgagggcagggattgtgtctggttaatttctgtattctctgcaactttgcaatgtttggcttgaagaaggagctc

SEQ ID NO: 1119 - DNA, 257 bp, Homo sapiens; identical to SEQ ID NO: 1118

SEQ ID NO: 1120 - DNA, 86 bp, Homo sapiens
tcagcaggatgtgtgtcgatgtcaacgagtgccagcgctaccccgggcgcctgtgtggccacaagtgcgagaacacgctgggctcc

SEQ ID NO: 1121 - DNA, 203 bp, Homo sapiens
caatgaggagggctttttcaccacccggaaggtgagcccccacagtggggtggtggccctcaccaagcctgtccccgagcccagggacttgctcctgaccgtcaagatggatctctctcgccacggcaccgtcagctcctttgtggccaagcttttcatctttgtgtctgcagagctctgagcactcgcttcgcgtcgcgggg

SEQ ID NO: 1122 - DNA, 291 bp, Homo sapiens
agaagctgcaatgtgcaatccccctgcccccacagccaaggtcaggaagaggccctgtggtcaccgtgtttggccaatttcaggctttcacttttgtactgcactgtggcttgccctggcggggggcagggggttggcaggacatggcaatgggcaactggggtgggcacagggcttattcctcggagtagaagggtgtacagggggcccagactccacagtgacttgccacatttgccccccatttggagaatgcttttatatcaaaagtggagacgataataaagttat

SEQ ID NO: 1123 - DNA, 114 bp, Homo sapiens
ttggcctgaaggctacaaattcagggtcagctgtatgcactaagtcaaataatgaatttcttcctccctctcgcaaccgaccaaaattttgacaacgatgatgttcaccagaag

SEQ ID NO: 1124 - DNA, 261 bp, Homo sapiens
tccctttgttccagcgccgcgatggtgagatcactgttccaagcagggggacggctcgcgataggacaaagagagcaggacctccagactttggggagccctgcagaccttgacaatttgcctgactcattcctgacctcttgtcattttggcctgaaggctacaaattcagggtcagctgtatgcactaagtcaaataatgaattttttcctccctttcgcaaccgaccaaaattttgacaacgatgatgttcaccagaa

SEQ ID NO: 1125 - DNA, 89 bp, Homo sapiens
aaagtctacccttaaaccctcagatcagtctttccaaagaattactctgtttgcattgttgtgattgacatttgtgaagtcccaagaaa

SEQ ID NO: 1126 - DNA, 123 bp, Homo sapiens
aatttatcaaaatgccggtacttaggacctaaatttatctatgtctgtcatacgctaaaatgatattggtctttgaatttggtatacatttattctgttcactatcacaaaatcatctatatt

SEQ ID NO: 1127 - DNA, 233 bp, Homo sapiens
aagaccctcaactcctggaggaagttctacacgaggctcaccaacagcaaacaaggggagactacagtctgagacccggggctcagcccatgcccaggcctcggccggggcgcaacgatcccccaaagccagcgccgtggagttcgtgccaatcctgacatctcgaggtttcctcactaacaactctctttcgcaggctcctttgaacaactcagctcctgcaaaagcttccg

SEQ ID NO: 1128 - DNA, 204 bp, Homo sapiens
tacattttatggtgtttcatagccaatcccacagtgtaaaaattcaggaattcaatgaaaaaagtctacccttaaaccctcagatcagtctttccaaagaattactctgtttgcattgttgtgattgacatttgtgaagtcccaagaaaagatctgttttcatgacagtagaaaatagaagtttgcaaattatttctttactca

SEQ ID NO: 1129 - DNA, 238 bp, Homo sapiens
cctgctctgtgcagcagtcgggctggatgctctgtggcctttcttgggtcctcatgccaccccacagctccaggaaccttgaagccaatctgggggactttcagatgtttgacaaagaggtaccaggcaaacttcctgctacacatgccctgaatgaattgctaaatttcaaaggaaatggaccctgcttttaaggatgtacaaaagtatgtctgcatcgatgtctgtactgtaaatt

SEQ ID NO: 1130 - DNA, 239 bp, Homo sapiens
gtttgaacaaactagcaacaattaagtgacccccgtcaacccactgcctcccaccccgaccccagcatcaaaaaaccaatgattttgctgcagactttggaatgatccaaaatggaaaagccagttagaggctttcaaagctgtgaaaaatcaaaacgttgatcactttagcaggttgcagcttggagcgtggaggtcctgcctagattccaggaagtccagggcgatactgttttccc

SEQ ID NO: 1131 - DNA, 146 bp, Homo sapiens
gggactttcagatgtttgacaaagaggtaccaggcaaacttcctgctacacatgccctgaatgaattgctaaatttcaaaggaaatggaccctgcttttaaggatgtacaaaagtatgtttgcatcgatgtctgtactgtaaattt

SEQ ID NO: 1132 - DNA, 231 bp, Homo sapiens
gttaattctatctccagtaggcctaatgcttgaataagcaagatgtctaatcaataaattattttcatgctcagaatttcaggtttttgtactccagcatagcttggtcttatttcttactgtatgaaagcttaacagcaatgtgatttaaggttttgttttaaatgggagatgtaagtgatttaattcatgggtacttttagaacctgatagataatcccattgccttta

SEQ ID NO: 1133 - DNA, 131 bp, Homo sapiens
aagggaagatttttcagttggagttgaagtaactggatgtttgggaaaaagcaatgttaataatgcctttttcataccatgcacagtttattcaaaatggattatagaactaaatgtgaatggcaaaacaa

SEQ ID NO: 1134 - DNA, 263 bp, Homo sapiens
cttgacctaactgattatgcgaaatacccaagattcatgctactgtaccacagatttgttttcacagcaataaattttcagttctttgtttatgattccacttaacaaaaggcctgcagaagtgatttattatttgggtatttggagataatacatttgatggttttttggaaaacctttttcactccatactcagatatgcttcattgtcaaatgcatatttagattagattattgaattgtaatgtttatctgctgctttt

SEQ ID NO: 1135 - DNA, 213 bp, Homo sapiens
gccttcctgtccatggacgtgaaactgcatagtaatgagactgtgcacactgatgtttacaagattgaaagagtctttctccgaaaatcatggtaaagaatactgagacaatgaaaaaaaatcaacaaaatatgctttctggagaactgtaccttctatggtttgcttgcacatcagtagtttctgctgaacgtgctgtcataatgaagagat

SEQ ID NO: 1136 - DNA, 272 bp, Homo sapiens
  misc_feature (201)..(201): n is a, c, g, or t
cttctatcttcagggcagggtacagctgggtattggaattgtaccaagcagtgtttcccaagggggcacagagggagggcccctctccgggcactgtgcgggagccacttccccaaacagtccccgttctgcaagggccccggcgttgctgcccccgagacccgggtgcctgccccggcggtgcgggtcgcgggcctccgntctcgccgtcctccctcagtcccgggcctcctgcatcgcggtcgccaggcgcaggctcagcgcggctgaca

SEQ ID NO: 1137 - DNA, 272 bp, Homo sapiens; identical to SEQ ID NO: 1136
  misc_feature (201)..(201): n is a, c, g, or t

SEQ ID NO: 1138 - DNA, 245 bp, Homo sapiens
gatgacctttgcttggatgtttccaaacttaatggcccagttacaatgctcaaatgccaccacctaaagggcaaccaactctgggagtatgacccagtgaaattaaccctgcagcatgtgaacagtaatcagtgcctggataaagccacagaagaggatagccaggtgcccagcattagagactgcaatggaagtcggtcccagcagtggcttcttcgaaacgtcaccctgccagaaatattctg

SEQ ID NO: 1139 - DNA, 223 bp, Homo sapiens; identical to SEQ ID NO: 92

SEQ ID NO: 1140 - DNA, 270 bp, Homo sapiens
ccatgtcagtctaaagagtctaaaggggccgggagaagcatgagcgaggggcagattctagtcgggagcccatgccctggaaatccatctttcttcatctttcccattgaccactttgggtttgacctgcacatctgcagtgagggcagaattcaacaagcacaactcactggtctttcagtcaacgtgctagaaaccgatgacttattaatctctaattttttggcgcctctttcattgaatgagaattgctttcgtatagttcacatt

SEQ ID NO: 1141 - DNA, 141 bp, Homo sapiens
agtgaagctcaagggtaaccagtgaggctatgaaattgccagtgaattaagaccagggctagagtcaacagtccagaacccctatccgtatgaacaggggcccgtttctggttgaaatcaaggttaggatgcaactgagaa

SEQ ID NO: 1142 - DNA, 264 bp, Homo sapiens
gccgggtcagtcctacatgtgagatgggttagggcaagtctttgccatcccccagatggctctgtcttcttgtgtatggcagggctgggactgctgtcccttgtacagttttctgtcactggtgggcactggacaggcatagcagactctcttgtggccacactaggttgtcgcctttcaggcagtgtcccgccacctttgcttcccgctccttctggacattccagagccctgcaccaaacccttacttggtgtctgcacctc

SEQ ID NO: 1143 - DNA, 128 bp, Homo sapiens
tattttgagtacaatatggctcattgacttttccattacatctgaggattccagagtcctctgttcatccctgggatagagtgagccctcttgcgtcttccagggtagctcaggttggcccagtttgg

SEQ ID NO: 1144 - DNA, 206 bp, Homo sapiens
attgcaaccaaaaaggtcagcacaaaggccttcacctacgtgaagacctcctggtaggatctgtccatgggatggagaaccactctgtccagatctggggttgggtcatgacaccagctaccaattttagaatattatttcttggtttctttatgaaaaatgggtgctagtggtaattgctttgtggcttagtaaactactctgtg

SEQ ID NO: 1145 - DNA, 271 bp, Homo sapiens
  misc_feature (70)..(71): n is a, c, g, or t
tgctcttcgaggtctagatatagctgtggcaagaggcacgctggggaggaagaaaagttctgggtaaccnnggaggggtcagggaggagtttcagaatgtagtcgtggccttggcttgggtgtggaagtaatagcaaactcagcaagataccttttatgttttgataacggctttatggagatataatttgcataccattcaattcacccctgtaaagtgtataaatcggtttttagtacattcatggagttgtgcaatcattaccatcat

SEQ ID NO: 1146 - DNA, 188 bp, Homo sapiens
cacaacttaaatagggcattttataacctgaacacaatttatattggacttaattattatgtgtaatatgtttataatcctttagattttataaatatgtggtataaggaatgccatataatgtgccaaaaatttgagtgcatttaatttaatgcttgcttatagtgctaaagttaaatgatcttaat

SEQ ID NO: 1147 - DNA, 114 bp, Homo sapiens; identical to SEQ ID NO: 201

SEQ ID NO: 1148 - DNA, 45 bp, Homo sapiens
aacagaaaagaaactgtagaccttgggacaatcaacatttaaata

SEQ ID NO: 1149 - DNA, 263 bp, Homo sapiens
acttgggagaaactgcatcctaagtggaagaactagtttgttttagttttcccagataaaaccaacatgctttttaaggaaggaagaatgaaattaaaaggagacttttttaagcaccatatagatagggttatgtataaaagcatatgtgctactcatctttgctcactatgcagtcttttttaagagagcagagagtatccgatgtacaattatggaaataagaacattacttgagcatgacacttctttcagtatattgc

SEQ ID NO: 1150 - DNA, 234 bp, Homo sapiens
aactgcttcatgagatgcagaacctccaggagcacccaggcttgggcagcagcccttgcattccttttttgtaccagactgatgagaacaatgaggtgaagatcaccatcatttaaaagccggccactgtcagcaaaacctggggaagtggggctggaggctctgcccctaccatgtccctaccaccccttcccagtcaaccctttaccctcacagtagcaagcataagacccc

SEQ ID NO: 1151 - DNA, 265 bp, Homo sapiens
  misc_feature (230)..(230): n is a, c, g, or t
  misc_feature (234)..(234): n is a, c, g, or t
attacattagccatgagtgtattatagaggctaagaatgataactctatgaaggtttattatgagattcccatatttggctcaaggttttatacaacttgatatgctacctactactagtcttccagttccactattgcaactagttaacacatacattgtacttattgtgtgccaggctctgttctgactgctttatatgtatctactcatttaattttcacaacagtnctanttattaagtgccattgtcctcacttaaaggt

SEQ ID NO: 1152 - DNA, 297 bp, Homo sapiens
atagaatttaagaaaactggcttggcatggtggctcatgcctgtaatcccagcactttgggaggccaacgcaggaggatcacatgaggtcaggagttcgagaccagtctgaccaacatgaagaaactccatctttactaaaaatacaaaattatccaggtgtggtggcacatgcctgtaatcccagctacttgggaggctgaggtgggagaatcatttgaacccgggaggcagaggttgccctgagccaagattgtgccattgcactccggccttggcaaccagagagaaactccgt

SEQ ID NO: 1153 - DNA, 288 bp, Homo sapiens
  misc_feature (169)..(169): n is a, c, g, or t
  misc_feature (227)..(227): n is a, c, g, or t
tcacgtatccaactacctactgattattctgcttggacatacatcagccattttaaatttggcctgagttgaactcattctctttctctcccacattcattgtgttttcatttgttttcttgaaatctcctggttaagtcagttcaggttgctatagaaaaaaattttnggtctggcgtggtgtcttgtgcctgtaatcccagaatgttgggaagcctaggtgggcngattgcttgagcctcaggagttcgagaccagccagggtgattatgaggaaactctgtctct

SEQ ID NO: 1154 - DNA, 275 bp, Homo sapiens
agaacacatagtccctaattagagtaaattactcctgatggaataagcattctgcaaaagcaggaaagaaaccaaatttaatttcccagtgccatagggaggtcttgactattcaaaaactgtctctaaatcttaggaactatgctttcaagggctaaactaatagaactgagcaggaaataagcctgattagcattttgtaagtaattttgagcacaaaagatatatttacaataatagccaagacttatcatctgcaattgaacccaaacact

SEQ ID NO: 1155 - DNA, 152 bp, Homo sapiens
ggtgagttaaggcagcacaaggtcactgggattgcctgaagcttgaccacaggcacgagtgactttcctcttggctggtaccatctgtataggggaatagaagatttttatcataacaaaggatatctcaatagagtcaattagcccagcat

SEQ ID NO: 1156 - DNA, 128 bp, Homo sapiens
gctatctgtggggaccttgtttattctagagagaattcttactcaaatttttcgtaccaggagattttcttaccttcatttgcttttatgctgcagaagtaaaggaatctcacgttgtgagggttttt

SEQ ID NO: 1157 - DNA, 51 bp, Homo sapiens
ctggttgatgagtctttagggagttcatagactattctgggttgtgtatag

SEQ ID NO: 1158 - DNA, 289 bp, Homo sapiens
  misc_feature (153)..(153): n is a, c, g, or t
ggacagtttgtgtatgaatcattttatttaagaattagggcaatcttttttgttggaagtagaataaattgtgctccaatttcaggtgcttatgaaaaatacattgtaccacaacctgaatattatgttgtgtaaatccctccagccatctcnatttggggcaacttttagataaggaatgaaattacttgtggtataatctataattatttttggcaaatgcatgagtttctcctgcttgaaatataaatgttttattaggtagccacagtatttggcccctgcatgg

SEQ ID NO: 1159 - DNA, 38 bp, Homo sapiens
tagctgggcatggtgacacacgtctgtagtcccagcta

SEQ ID NO: 1160 - DNA, 126 bp, Homo sapiens
gggagtgcactctgcaggttagctttatgaagggttgaatggaatttggtgagctttgaggagtcccaggattacaagttctttgtcttggttcacaacaagctgtgcagtccccttttgtttgtt

SEQ ID NO: 1161 - DNA, 281 bp, Homo sapiens
ccactcggcagagggtctaggcctggccgcgtgtcggtcggcgctagggccccgcggaaggcccgggcgggcggggaccggcggcgggagcggcgcggcgcggagctgcctccatccatggcacggagcggcggcggcggcggcagcaggagcccggcgcgatccgctaggtcccagcccagcgcccagcgagcaggcgacgcggaggggccgggcctccagtgtcccgagggccgggcgctgagactccggtcgcgcagctgggagctgcccgcgctgcg

SEQ ID NO: 1162 - DNA, 129 bp, Homo sapiens
ccacacacactccttggaatgggtcctgttatttatgcttgctgcacagacatattagaagaaaaaaaaaagctttgtattatttttccacatatgctggctgctgtttacacaccctgccaatgcctt

SEQ ID NO: 1163 - DNA, 289 bp, Homo sapiens
ttttcccatccatctatgaggaaagccatctcacagaacatggacataggcaacttgctctcccacaccaagggatgggaatctctcctacctatagtcatccctgcactcctgactttactccaggacccagggtccaactaatggcagagcccctcttggttccttcaaacaagaaaagcaatacctacggactggtgtacacttccatccttggttataacaggaatgttatcaagctgtcagaacaggatgaagtgctcccagtggatatccatcagggagggtt

SEQ ID NO: 1164 - DNA, 261 bp, Homo sapiens
ctttgtctgttgttggcatagattcttttgtacatatttatttatttgtgtttatatatgtcaattggtttcctttcttagcttgatattgcctagctttgttgttttaattaactttctattagagagactgtatatattttttctaaatactttgtgaaatcatttttggtagcaatatctttgaatatgatgaataaaagtgactgtgagtgcaaatagaattagcagtaagaagctactctagctaatttgccattt

SEQ ID NO: 1165 - DNA, 258 bp, Homo sapiens
tccaggtaatgagccagtggtttctttcattttaattaattagttagacatataaaaacttgctgatcacttagcagttgctgcttccaagaggtcttggtccatgaagtggcaaggtctgaatgttggctaagtttaactagagcagtagccataaagtattgtgggagctcagagtgggtatgctttcataatctgggtgacaggggtggtcagcttaccttctacaagaggggttactggagctaagcatgagta

SEQ ID NO: 1166 - DNA, 57 bp, Homo sapiens
atgaggcagaatctggttgggtatgtttcttatatatgtttgaagcagatggctgac

SEQ ID NO: 1167 - DNA, 300 bp, Homo sapiens
gtgagttgattcctccaatatgggccagatgcttttgaatgatagggaaatctacataaaatccagtgtcctctttattgagggagtatatgtatccatctcagtgatccatgtccttagtgaagtccacattattctctgtggggacaagagctgggcagttttgaatgggtcttgaggtgggtaccccatgtgcactttctgaggatgcctcacttccctgggctctgcagagaacacacagagagaagactttcagagctcacaggagcagggagcaggagcactctaagggaattc

SEQ ID NO: 1168 - DNA, 234 bp, Homo sapiens
caggaaaccatgcactgagttcctatatttcatttttcttaaatgctccagctacacccaaggactgactgaggggccgggagactgggctccgtgcccaggtggcaggggcgtgtaattctaacaccgcaggcagcccctgctgacgagatacagaggagtaacgacagttaatagtaaacgaagcgaagccccgggaggtgtagcgagcatgtccacgacagccagtcactg

SEQ ID NO: 1169 - DNA, 222 bp, Homo sapiens
gggaataataatctctaggaaaattatgtccactttaggagaatctgtcaagtgtagccactttggtgttgttctgataatatactgtatatgtacaacttaataaattttgatgaggcagaatctggttgggtatgtttcttatatatgtttgaagcagatggctgactactaacaggtcattgccaggtgtatttctatactctttgaagaataacattt

SEQ ID NO: 1170 - DNA, 250 bp, Homo sapiens
gacccagagcgagatgggtttgttcggtgccagccgaccaagattgactagtttgttggacttaaacgacgatttgctgctgtgaacccagcagggtcgcctccctctgcgtcggccaaattggggagggcatggaagatccagcggaaagttgaaaataaactggaatgatcatcttggcttgggccgcttaggaacaagaaccggagagaagtgattggaaatgaactcttgccctggaataatcttg

SEQ ID NO: 1171 - DNA, 267 bp, Homo sapiens
ttctcctccgtgacagccagagtaatccaaaggcatttgtactcacactgtgtcatcaccagaaaattaaaaatttccagatcttaccttgcgaggacgacgggcagacgttcttcagcctagatgacgggaacaccaaattctctgacctgatccagctggttgacttttaccagctgaacaaaggagtcctgccttgcaaactcaagcaccactgcatccgagtggccttatgaccgcagatgtcctctcggctgaagactggag

SEQ ID NO: 1172 - DNA, 289 bp, Homo sapiens
  misc_feature (51)..(51): n is a, c, g, or t
  misc_feature (141)..(141): n is a, c, g, or t
  misc_feature (152)..(152): n is a, c, g, or t
  misc_feature (154)..(154): n is a, c, g, or t
  misc_feature (157)..(157): n is a, c, g, or t
  misc_feature (161)..(161): n is a, c, g, or t
  misc_feature (179)..(179): n is a, c, g, or t
  misc_feature (184)..(184): n is a, c, g, or t
  misc_feature (191)..(191): n is a, c, g, or t
  misc_feature (197)..(197): n is a, c, g, or t
  misc_feature (205)..(205): n is a, c, g, or t
  misc_feature (215)..(215): n is a, c, g, or t
  misc_feature (238)..(238): n is a, c, g, or t
  misc_feature (248)..(248): n is a, c, g, or t
ttgtgtcctgttgcggaaaaattactaacaattaaaaagcaaagtacagancagtatatagagagaaggctacatttgtgtgaagggaacaggaaaaattggaatatttgtatttgatggtatgctcatgaacattgtgtnagctgcaggananaanaaanaggttgcttagtaggganagganatggganaggcanctgtgcanataggggcancggccaggggtgatcttttgaanctgtctgtanatggttgaaattttaatctgcaaatgaatcatctgttttgg

SEQ ID NO: 1173 - DNA, 120 bp, Homo sapiens
tgtataaacgttttcagggaatgcagaaggtattaatgaagagacaaaacctttattccatgtgctttgcttcattctgtacatagctctttggctcgtgaacctaattgtaaactttca

SEQ ID NO: 1174 - DNA, 200 bp, Homo sapiens
ccttttgataggcacgattggatcataaaccgttgcgggacagaagttagatatgtgattgattattatgatggtggtgaagtcaacaaggactaccagttcaccatcctggacgtccgtcctgccttagattcactttcggcagtatgggacagaatgaaagtcgcttggtggcgttggacctcgtaaagcactgtttc

SEQ ID NO: 1175 - DNA, 245 bp, Homo sapiens
ttgccattgaaactttttgtaccagtaatccataaactggttgttctatttatagcagcatgttacaaatgactgctttttttttttaactgtctatactattaaatcctttaatttatcctgaatgctgtagtgttaaattagtggatgaaattggcagtctgtgggtgattaatttggtatggatttgtcagttttgtgtggagtttaagaaatagaacagccttaaactctacatttcaaaa

SEQ ID NO: 1176 - DNA, 170 bp, Homo sapiens
cagaagaccgcccagaacatgcttgctagtaacacctcttcccacccacctcctgtgaataatcatgtaagactcccataaagggagtttctccagcagtgatcaatgctgtctcatccttaggagcagcccaccctgaatcctctcagggtgtacagtttattttgcac

SEQ ID NO: 1177 - DNA, 287 bp, Homo sapiens
cactctggccaatgattggttcattccaggacattcatttgcataaggagtcaaaccacaccagtcttggattggctgtgagccaattcacctcagtctttaattggctgtgagtcagtctttcatttacatagggtgtaaccatcaagaaacctttacagggtacttaagccccagaagattttgctaccagggctcttgagccacttgctctagcccactcccaccctgtggaatgtactttcacttttgctgcttcactgccttgtgctccaataaatccactc

SEQ ID NO: 1178 - DNA, 217 bp, Homo sapiens
tttgggtttcattctctcttactatatatagggtgtcagagcagggcactgtttctcacactaactttcgttttctttctaggttaaatttgcttcttaataaaatacacctctttccctggcgctttgtagtactccttgtgttgaaaatcaagtattcatttggctgttaatctatccttgtacctgtataacaccgtacaagttactgtatctt

SEQ ID NO: 1179 - DNA, 213 bp, Homo sapiens
tcctcctacttcagctcccacaagtagctgggactgcagctatgtgccatcatgcctggctgatgtttatatgttttgtagagacgaggtttcaccatgttgcccaggctggtcttgaactcctgagttcaagcgatccacctgccttggcctcccaaagtgctgggattactggtatgaaccaccacgcccgacagtaaatatgttttgaat

SEQ ID NO: 1180 - DNA, 238 bp, Homo sapiens
tacaagtgccttctgattctagacctcattccgtaagttcccttggctctagacttcatcatttccagctcctcctcactcaagatctgactccaaattaccctgggtctagaattcagccttcaaatatcttctgattttagactttgccttatacatttctctggttttagatcttaccaccctcaactccttctgattctagatcttatggttcccaaatctctctggttctaga

SEQ ID NO: 1181 - DNA, 275 bp, Homo sapiens
tcttggtctcccacaggaaaaggcctccccccttcttagccccatttaccccgtttgtggaaggcactgctcgctctgttttgtcagagagtggcctatccagattggtgctatgggggggtctgacccctccctcctccctctggaggtgatgtgggccctcaatggagggaattgtgctgggctagggaaaggggagggactagactggccacactggctctgaaactcaccaacctctatacaccataaagacctcaccttggtaggcacca

SEQ ID NO: 1182 - DNA, 295 bp, Homo sapiens
accagttagaagacattgggctgtttccaagtttgggtgattacaaaaaacagctactgtaaacattctcatacaagattttatgagatcacatgttttcatttctcttgggtaaacagctaggattggaatggatgggttatatagtaagtgtatatttaatctaagaaactgccatggctgggcacagtggctcacgcctgtaatcccagtactttgggaagccaaggaaggaggatgactagagcctctgaggtgaagaccagcctgggcaaagtggttaagactcaaccgc

SEQ ID NO: 1183 - DNA, 250 bp, Homo sapiens
  misc_feature (64)..(64): n is a, c, g, or t
  misc_feature (126)..(126): n is a, c, g, or t
  misc_feature (128)..(128): n is a, c, g, or t
  misc_feature (133)..(133): n is a, c, g, or t
agccctccagacatgcacttaccttgactttaccccacatgtttggggcacctggggctccctnaccccttgggtggtttgcaatctgaagacttctccagccacacaggcacatgcacaggcacngngctgnctgcatattgccaggtggggagagaagccaggaaccctcagctgtctgccaccatctatgtgcctcccttaccccccagcttttttttttacagatggtgctactcttggtctccca

SEQ ID NO: 1184 - DNA, 243 bp, Homo sapiens
caggcttttaactgccaggaaggggagacgggttggtgtgggatatgatgaggtttctcttcaaataacccgatcaatcttttattctttaattgatagtaccccccacctttttcccttcttctcctcttttcctttttgcctttgttaaatgcccagacacgccacaataccaggcgttatcaataccagctcacattcctttccttatttaaaaaaaggactaactttctaactcatcac

SEQ ID NO: 1185 - DNA, 229 bp, Homo sapiens
cagcacttctgagtcactttacctccactcagatcaggagcagaagtccctgttccccgctcagagactcgaactttccaatgaataggagattatcccaggtgcctgcgtccaggctggtgtctgggttctgtgccccttccccaccccaggtgtcctgtccattctcaggctggtcacatgggtggtcctagggtgtcccatgaaagatgcaaagcgcctgaatttt

SEQ ID NO: 1186 - DNA, 236 bp, Homo sapiens
actctcaggctgcgtccagcgacagtgcccagggctctgatgtgtctctcacagcttgaaaagcctgagacagctgtcttgtgagggactgagatgcaggatttcttcacgcctcccctttgtgacttcaagagcctctggcatctctttctgcaaaggcacctgaatgtgtctgcgtccctgttagcataatgtgaggaggtggagagacagcccacccttgtgtccactgtgac

SEQ ID NO: 1187 - DNA, 209 bp, Homo sapiens
tgggagccgtcttcccagtccaccgtccccatcgtgggcattgttgctggcctggctgtcctagcagttgtggtcatcggagctgtggtcgctgctgtgatgtgtaggaggaagagctcaggtggaaaaggagggagctactctcaggctgcgtgcagcgacagtgcccagggctctgatgtgtctctcacagcttgaaaagcctgaga

SEQ ID NO: 1188 - DNA, 230 bp, Homo sapiens
tgtggagaccagaccagcaggagatagaaccttccagaagtgggcagctgtggtggtgccttctggagaagagcagagatacacatgccatgtacagcatgaggggctgccgaagcccctcaccctgagatgggagccatcttcccagtccaccatccccatcgtgggcattgttgctggcctggctgtcctagcagttgtggtcatcggagctgtggtcgctactgtga

SEQ ID NO: 1189 - DNA, 132 bp, Homo sapiens; identical to SEQ ID NO: 176

SEQ ID NO: 1190 - DNA, 132 bp, Homo sapiens; identical to SEQ ID NO: 187

SEQ ID NO: 1191 - DNA, 193 bp, Homo sapiens
agacagcccccccctgtgtccactgtgacccctgttcccatgctgacctgtgtttcctccccagtcatctttcttgttccagagaggtggggctggatgtctccatctctgtttcaactttatgtgcactgagctgcaactttttacttccctactgaaaataagaatttgaatatacatttgttttttcaaa

SEQ ID NO: 1192 - DNA, 273 bp, Homo sapiens; identical to SEQ ID NO: 213

SEQ ID NO: 1193 - DNA, 278 bp, Homo sapiens
aactttcctggggaacgtctcctcacagcgtgcacaagagcctccctttagaaatggagtgttcattttatcatgggaaaagaatctgagtgggacatgattcagaacaggaccggcccaaggaagtgcaggggctgtggagtgggatggagacaagctctgaaaggacacatgggagatctagatgtagaaggtacacaagtagtacgatactcacaggatggatccactggaagttaagacatgtggtagacagtgtaataggaagctgctcagtt

SEQ ID NO: 1194 - DNA, 32 bp, Homo sapiens
aaggctgcggtggtctccataggcctgatcca

SEQ ID NO: 1195 - DNA, 268 bp, Homo sapiens
gcaattacactggatcctgtgacagacacctcatgcttcatgggtcacatggtctgtttctgctcttctctgccgtggttggtgggggttgtggtgttagagaaatctcaggtgggagatctggggctgggacattgcattggaagacagatttgcttccataccttttaagtatatatattttcctctttttcccaggacactctggacttcacccaaaaggtaataccttttaatcttctttcagaaagagattcggtttccctag

SEQ ID NO: 1196 - DNA, 276 bp, Homo sapiens
acagtggaatggagtacacggactgaatctgcacagagcaagatgctgagtggagtcgggggctttgtgctgggcctgctcttccttgggacagggctgttcatctacttcaggaatcagaaaggacactctggacttcagccaacaggactcctgcgctggactcctgagctgaagtgcacatgaccacattcaaggaagaaccttctgccacagctttgcaggatgaaaagctttcccacttggctcttattcttccacaagagctctctcagg

SEQ ID NO: 1197 - DNA, 174 bp, Homo sapiens
  misc_feature (27)..(27): n is a, c, g, or t
  misc_feature (78)..(78): n is a, c, g, or t
  misc_feature (96)..(96): n is a, c, g, or t
  misc_feature (123)..(123): n is a, c, g, or t
acgagccctctcacagtggaatggagngcacggtctgaatctgcacagagcaagatgctgagtggagtcgggggcttngtgctgggcctgctcttncttggggccgggctgttcatctacttnaggaatcagaaaggacactctggacttcagccaacaggattcctgaactga

SEQ ID NO: 1198 - DNA, 256 bp, Homo sapiens
ccctcctttaagtgttgaggattttctgtttagtgattccctgacccagtttcaaacagagccatcttttacagattattttggagttttagttgttttaaacctaactcaacaaccctttatgtgattcctgagagcagtatgaggcctgcaagaaagtgatcatataattgtatcttcactttctttttatttttgtattacattgggatgcattgtcatgcatattttttgtagaataaattctcctttgcta

SEQ ID NO: 1199 - DNA, 120 bp, Homo sapiens
  misc_feature (35)..(35): n is a, c, g, or t
  misc_feature (88)..(88): n is a, c, g, or t
tctcatttctacttggggcccccttcctaggactntcccaccccaaactccaacctgtatcagatgcagcccccaagcccttagactntaagcccagttagcaaggtgccgggtcaccct

SEQ ID NO: 1200 - DNA, 109 bp, Homo sapiens
tgcacgggcattgaactgctcgtgacggggggtgcagagctggggtacgggtgcaaggccagtcggagcacccccgtggacgcccccgatatcccttcctgatttctct

SEQ ID NO: 1201 - DNA, 262 bp, Homo sapiens
atgtggcagatgtggtcgcattcttggcatctgaagatagtggatacatcacagggacctcagtggaagtcactggaggtcttttcatgtaactgcctcaaggaccctggactctgctcacccccccaccactttgcctggcctcctgctgatgaggactttaagttcccaggatacaaaaggggtggcagtgtatggttcaggaatgctgaatatgggaagcaggggtgcttgtgaccctaataaattccaagtcctcttc

SEQ ID NO: 1202 - DNA, 241 bp, Homo sapiens
taaaaacattattcgaggtttctctttaatgcattttgcgtgtttgctgacttgagcatttttgattagttcgtgcatggagatttgtttgagatgagaaaccttaagtttgcacacctgttctgtagaagcttggaaacagtaaaatatataggagcttaaattgtttatttttatgtactactttaaaactaaactgaacattgcagtaatgttaaggacaggtatactttttgcaaac

SEQ ID NO: 1203 - DNA, 279 bp, Homo sapiens
aaagagctcgaaagagtttgcaaccccatcatcagcaaactttaccaaggtggtcctggcggcggcagcggcggcggcggttcaggagcctccgggggacccaccatcgaagaagtggactaagcttgcactcaagtcagcgtaaacctctttgcctttctctctctctcttttttttttgtttgtttctttgaaatgtccttgtgccaagtacgagatctattgttggaagtctttggtatatgcaaatgaaaggagaggtgcaacaacttagtttaa

SEQ ID NO: 1204 - DNA, 161 bp, Homo sapiens
tgtggaccccaccaaggtctcctcctccctgtcccctgagggcacactgaccgtggaggcccccatgcccaagctagccacgcagtccaacgagatcaccttggagtcacgggcccagcttgggggcctaggagctgcgaaatccgaccagtctgcagcca

SEQ ID NO: 1205 - DNA, 61 bp, Homo sapiens
cccctgagggcacactgaccgtggaggcccccatgcccaagctagccacgcagtccaacga

SEQ ID NO: 1206 - DNA, 222 bp, Homo sapiens
tgcagaggacagtggacgtggagctgcggggtgtgaggactgagccggcttccccttcccacgcagctctgggatgcagcagccgctcgcatggaagtgccgcccagaggcatgcaggctgctgggcaccaccccctcatccagggaacgagtgtgtctcaaggggcatttgtgagctttgctgtaaatggattcccagtgttgcttgtactgtatgtttct

SEQ ID NO: 1207 - DNA, 213 bp, Homo sapiens
ggggcctaggtttgctcctttgttgtacaggggctgtcccagttagtgctgacctcatcccagaaccccctgggaaatatcccctgtcctcagagctgtgtcccctccccaaggacagtgcagactaactgaggagcctgataaaccttagctgcatggcacacttgcaattttaaaatccttctgaagttgactggtgtttgtacttgcttc

SEQ ID NO: 1208 - DNA, 129 bp, Homo sapiens
tcgccctgcagagaagagaaccatgccaggggagaaggcacccagccatcctgacccagcgaggagccaactatcccaaatatacctggggtgaaatataccaaattctgcatctccagaggaaaataa

SEQ ID NO: 1209 - DNA, 121 bp, Homo sapiens
ggagttgcctcgggcagccttgtggctactctgcagtcactgggagcaactggactttccggattgaccaagttcatcctgggctccattgggtctgccattgcggctgtcattgcgaggt

SEQ ID NO: 1210 - DNA, 86 bp, Homo sapiens
aaacagcgtggattttacttatctgtgtattcacagagcttagcacagtgcctggtaatgagcaagcatacttgccattacttttc

SEQ ID NO: 1211 - DNA, 261 bp, Homo sapiens
gtaaaagtggataatcttgtcttgtactttattttagaggaaaagctgtcagtttttcactgctgaatatgatgttaactatgaactttttatacatgtatttactatgttgaggtaatttccttttactcctggtttaagtgttttttgtttttttttgtttttttttttttttaaatcatggaaggacttgggttttatcaaatgtcttttctgtatctattgagatgaccaatttgtattagtcagcgttcttcagag

SEQ ID NO: 1212 - DNA, 217 bp, Homo sapiens
agaagtggtaaaagtggataatcttgtcttgtactttattttagaggaaaagctgtcagtttttcactgctgaatatgatgttaactatgaactttttatacatgtatttactatgttgaggtaatttccttttactcctggtttaagtgttttttgtttttttttgtttttttttttttttaaatcatggaaggacttgggttttatcaaatgtct

SEQ ID NO: 1213 - DNA, 240 bp, Homo sapiens
ctagccagggagaaagagtgagatcctggctcaaaaaaaccaaataaaacaaaacaaacaaacgaaaaacagaaaggaagactgaaagagaatgaaaagctggggagaggaaataaaaataaagaaggaagagtgtttcatttatatttgaatgaaaatatgaatgactttaagtaattgaattaattaaaatgagccaacttttttttaacaatttacattttatttctatgggaaaaa

SEQ ID NO: 1214 - DNA, 165 bp, Homo sapiens
ttgttttgtcaatatatctcaaccttacctaatgtgagattttaaacagcattcaataatagtaataacataacattttatagctccttctcctacattatttgtaaatctcacttaaactgctatcttatttttcttttcgtagtatgcatcctatgtttccaa

SEQ ID NO: 1215 - DNA, 250 bp, Homo sapiens
attacttatcacctcagtaaaatggagacaataatattacttaccatctaggtttattttgagacttaaataacttaatgtatgtaaagtatttatattgtgagtgcaaaataaattaactattataatagtccctaatgtacttaatatctaactgcaaacattgccaagttttctttttgtccaaagtcacaacagttttctttaggaaattttccatacaaagtggggcacattttcactgggttct

SEQ ID NO: 1216 - DNA, 266 bp, Homo sapiens; identical to SEQ ID NO: 226

SEQ ID NO: 1217 - DNA, 212 bp, Homo sapiens
aatgtaactttgtgtcactgaataagtgacttacttcctaaacatgacggtcagacaggaaatcacttttcttgtgattagcataatgcttatattgtttttttagctacagtctaatcattacaaagaactactcgttgtgtccatattaaaattaaaagtaccttgccataacaaaagcacattctaagcctttcgaaatgtcaacatat

SEQ ID NO: 1218 - DNA, 32 bp, Homo sapiens
tagtttgcatgcgtaaggcattcgcaccaaag

SEQ ID NO: 1219 - DNA, 170 bp, Homo sapiens
gttttcccatctagaagctcatgctgcatatagacctgcaaaggtattagtccaggtaccaatggcaacttttatgttatccatcaatcactttaatgagtacaagaaagcatcctatcaccctgccaaaagacagaggaattaagaatgactcatttatcacttaaatg

SEQ ID NO: 1220 - DNA, 143 bp, Homo sapiens
aaatataaaatgttattacaaggccaggagcagtggcacatgcctgtcatcccagcactttgggaggctgaggcgagcagatcacaaggtcaggagatagagacaatcctggctaatacggtgaaactccatcactgctaaaa

SEQ ID NO: 1221 - DNA, 67 bp, Homo sapiens
caagtttggttagagaggagacataagctcaagagatttattgtccctcatgatgactataattaat

SEQ ID NO: 1222 - DNA, 256 bp, Homo sapiens
attccaattttaactagaaaacacatatttattggccaggcacagtggctcatgcctgtaatcccagcactttgggaggccaaggcaagtggatcacttaaggtcaggagttcgagaccaccctggccaatatggcaaaaccccgtctctactaaaactataaaaattagccaggcgtggtggcacatgcctgtaatcccagctactcgggaagctgaggcaggagaatcactggaatcccggaggcggaggcaga

SEQ ID NO: 1223 - DNA, 161 bp, Homo sapiens; identical to SEQ ID NO: 9

SEQ ID NO: 1224 - DNA, 143 bp, Homo sapiens
aggtgccgagctataaacctccagaatattattagtctgcatggttaaaagtagtcatggataactacattacctgttcttgcctaataagtttcttttaatccaatccactaacactttagttatattcactggttttacac

SEQ ID NO: 1225 - DNA, 112 bp, Homo sapiens
atggatgagtacattttaagggcacttggaagtaggatagaaggagtgaggtgggatctattctcctaagtaccaaggctgtagaaccataagttagggacagaggagacca

SEQ ID NO: 1226 - DNA, 199 bp, Homo sapiens
atgctactttatatacggaaagtgatgttcaccccagttgcaaagtaacagcaatgaagtgctttctcttggagttacaagttatttcacttgagtccggagatgcaagtattcatgatacagtagaaaatctgatcatcctagcaaacaacagtttgtcttctaatgggaatgtaacagaatctggatgcaaagaatg

SEQ ID NO: 1227 - DNA, 195 bp, Homo sapiens
atgctgcaggtcaacagctatgctggtaggctcctgccagtgtggaaccactgactactggctctcattgacttccttactaagcatagcaaacagaggaagaatttgttatcagtaagaaaaagaagaactatatgtgaatcctcttctttatactgtaatttagttattgatgtataaagcaactgttatgaa

SEQ ID NO: 1228 - DNA, 215 bp, Homo sapiens
caaaattatacaacaagtctctaggaagttccaaactttttcacatctgcctgtcttcttctgagcctccaaactgttccaacgtctgcctattacccagttcaaaagtcacttccacattttcaaattatctttgtagcagtacccccatctgccaattatctgtattagtccattttcacacttctacaaaggtactacctgagcgccactgc

SEQ ID NO: 1229 - DNA, 95 bp, Homo sapiens
aagatgatcagaccttggatcagatgaactcttagaaatgaaggcagaaaaatgtcattgagtaatatagtgactatgaacttctctcagactta

SEQ ID NO: 1230 - DNA, 85 bp, Homo sapiens
tctttgtagcagtacccccatctgccaattatctgtattagtccattttcacacttctacaaaggtactacctgagcgccactgc

SEQ ID NO: 1231 - DNA, 123 bp, Homo sapiens
gccttattcctgtgccttgttttcctcttgctctttttttacctgtatatctaatttatattttcatatatattgtgtattgattgaagtcactttaaatccttcttgggaatgacacagtat

SEQ ID NO: 1232 - DNA, 232 bp, Homo sapiens
ctccatggcatgtcttgagggtcctttcttgttaggagtttatcctgccagcccataaatggactatttattgtaagtgtagaaaatcacagagaagcagttttgcaccagccttattcctgtgccttgttttcctcttgctctttttttacctgtatatctaatttatattttcatatatattgtgtattgattgaagtcactttaaatccttcttgggaatgacacagta

SEQ ID NO: 1233 - DNA, 265 bp, Homo sapiens
agcactcagaggcacgggagacgacgcaggcaccgcagctactctcctcccttgccctccggcctcagttcctggagctctgaagaggacaaggagaggcagccccagagctggcgggcccaccgccgcggctcgcactccccacactggcccgaggagaagccgcctagctaccgctcactggatatcactccaggcaagaatagcaggaaaaaagggagtgtggagaggcgctcggagaaagacagctctcatagtggaagga

SEQ ID NO: 1234 - DNA, 134 bp, Homo sapiens
  misc_feature (26)..(26): n is a, c, g, or t
tggtctctaaatggccgtacgtattngtttcactttctgccttggcatgtgaacttctatcttttttactgcactgtgtgtcctttatcactatggctgtacttttttaagtcgtgcttttaaatatcgctatg

SEQ ID NO: 1235 - DNA, 107 bp, Homo sapiens
aatgggacacgcaagaaaatccgatttacaagagtcctattaataatttcaagaatccaaactacggacgtaaagctggtctctaaattgccggtgaaaatcctatt

SEQ ID NO: 1236 - DNA, 114 bp, Homo sapiens
acagctctcacctacgcgagtcttactttgagttagtgccataacagaccactgtatgtttacttctcaccatttgagttgcccatcttgtttcacactagtcacattcttgtt

SEQ ID NO: 1237 - DNA, 127 bp, Homo sapiens
gccaaatgggacacgcctggagtgcagtggtgtgatatcagctcactgcaacctctgacttccagattccagcaattctcctgcctcagcctcccgagtacctgggattacagggtgaaaatcctat

SEQ ID NO: 1238 - DNA, 249 bp, Homo sapiens
tgattgtgggtggatttatgtatttgaaaactcacagaactatgtactttaaaaagatgtatgttcctctatgaaaattatatctcagtaaactttggcttataaaaatcttaaaagccctaagtgaccgaaaggttatgttagcattgagtgctttgaaatatggagtcagagggtggggtaaccaaatgttggcctttgtgtattcatcttttgatacaagaaagcaatgccaatcttcagtatttt

SEQ ID NO: 1239 - DNA, 231 bp, Homo sapiens
gtgcaaatcccacaacactgaatgcaaagtagcaatttccatagtcacagttaggtagctttagggcaatattgccatggttttactcatgtgcaggttttgaaaatgtacaatatgtataatttttaaaatgttttattattttgaaaataatgttgtaattcatgccagggactgacaaaagacttgagacaggatggttattcttgtcagctaaggtcacattgtgcc

SEQ ID NO: 1240 - DNA, 145 bp, Homo sapiens
gccaaatgggacacgtctctctctgtcgcccagcctggagtgcagtggtgtgatatcagctcactgcaacctctgacttccagattccagcaattctcctgcctcagcctcccgagtacctgggattacagggtgaaaatcctat

SEQ ID NO: 1241 - DNA, 188 bp, Homo sapiens
ctctgccgggggtgggatgccaggacaccccctcccacactcaggacagagccaaccctgtctccatggaccttctggaggaaggtgggggtttcaaagactgggggaccccttcctcctgactccagcacccagacctgggaagagctcgaccccgatcagcctgagttccgccagcgcctacttct

SEQ ID NO: 1242 - DNA, 159 bp, Homo sapiens
tcttcaaggacgtgccctctttgctctcagaaccttggggaaggtggctggactgctgggcgggggacatctcggggtttcagggtgggcagggggttagtttggggaggggggggtgcgtttcttttgcatgactgtggcctgttgctcatgactttc

SEQ ID NO: 1243 - DNA, 233 bp, Homo sapiens
cagtgatgcatgcttttcggggaaaacttcattcacaagtattccagacaccaggcttcaggcatggccatgagcaagaccagcaaataacagctttttcccttgcagccctgaccccaatgtctgctgtttccaacactggtgatttctaactacggcccacagcagatgctgttgaataacaccatggcttcatcagaggatgtggggttgtagtacctctgggtgatgaa

SEQ ID NO: 1244 - DNA, 274 bp, Homo sapiens
gattttcaggactagggatcacaactgcagtttcatatggttggatggagtagtctttttgtggaggaatttatatgagaattttagcttactgtttttttggtagtgggtattggcagggtagaaaaataagattatggattttttagtgttagcaatgtatttgacagctgagaagaatggtggcaagacttatggtaattcaagttcaaatttactttgcagtcagatgctttaccactgagctatatacccctgccaatttactttgatg

SEQ ID NO: 1245 - DNA, 244 bp, Homo sapiens
  misc_feature (196)..(196): n is a, c, g, or t
  misc_feature (208)..(208): n is a, c, g, or t
tgaaaggaaaggactcttcagagaagaaacggaaacggaagctagaaaaggtagagcaactttttggagaaggaaaacagaagtccaaggagttaaagaaaatggacaaacctagaaagaagaaattaaaattaggtgcagacaaatcaaaggagctgaataaactggccaagaaactagcaaaagaagaagaganaaagaaaaaganggagaaggctgctgcagccaaagttgaacttgtgaa

SEQ ID NO: 1246 - DNA, 215 bp, Homo sapiens
ttagatatggttaattgcattacatttaaaagatttaaaaaattgtgtgtatgctcaggttccccacacccatacccaccctaacccctgtcatttacattggtggcaactttaaatggtaaccaagcaaaagtacattttgataatgagtattgataatcctgaggaaaactagtgagtatatgggagccacctttgacctgtgccaaagcagt

SEQ ID NO: 1247 - DNA, 271 bp, Homo sapiens
aatgcattattttaggccaggcaaggtgtggctcacgcctgtaatcccagcactttgggaggccgaggtgggcggatcacctgaggtgaggagttcgagaccagcctagccaacatggtaaaaccccatctttactaaaaatacaaaaaatgagcagggtgtggtggcggacacctgtaatttcagctacttgggaggttgtggcaggggaatcgcttgaacccaggaggcagaggttggagtaagccaggatggctccattgtgctccag

SEQ ID NO: 1248 - DNA, 295 bp, Homo sapiens
tgtgttggaccctcccagtttagatcaagtatttcttgggggtcttgctattgtggttgataccaataaatggaagatccagaatattttcatttaaagctcaaccattaattggaacatggtgaaacattgtacacattgtaaaagtagggaacagtacaaaagaatggaatcaaatactatattatgtgaataaactagagtgattttggaatttcactctcttcaccccttctcacttgtatgttctgtaaagtgtatttctactttggtaggaagaaagacttgatttaat

SEQ ID NO: 1249 - DNA, 144 bp, Homo sapiens
ggtctcactctagtctgtgctggctcttttttcttttgtgtgtgaatgtttgaaactatggtgctgtgtcctcttccctcctgttgtgttctctgttcttcttaaggtattaggtaagctgtatgtaaactcttattagaaggg

SEQ ID NO: 1250 - DNA, 250 bp, Homo sapiens
gggttctggatgcaattcgtgcacgccaagaaactacttgcttgtcagtattttaattctgtagtacatgtgtgtgaatatcagccagtacttacagtaggaggatgaacagaaaaactgagaagacctgtctttcaaaagatgggtttatccactttttaagggaaaaagtgacagtttggcatgggatttgaaaagtggaaattgtggaaaaattgagctgttgaagtcccacatataaccagattta

SEQ ID NO: 1251 - DNA, 274 bp, Homo sapiens; identical to SEQ ID NO: 1244

SEQ ID NO: 1252 - DNA, 208 bp, Homo sapiens
attatactgaatcttgatgtttaagagctatgtatattgaggacattatttctttgtcttgtgttgcaaattttttaccatgttattattagtcttttaaccttatttatagtttttttgttataaaagttaagttttatgatgtaaacttaatctctttgattttataattcctggttttcccgacgtgcgtagaatgaccttcccc

SEQ ID NO: 1253 - DNA, 108 bp, Homo sapiens
ggaggccagggcaggtggattgactgagctcaggagtttgagaccagcctgggcaacatggtgaaaccccatctttactaaaaattcagaaaattggccgggcatggt

SEQ ID NO: 1254 - DNA, 227 bp, Homo sapiens
aaaagcataaaaagaggccgggcgcggtggctcacgcctgtaatcccagcactttgggaggccgaggcgggcagatcatgaggtcgggagattgagaccatcctggctaacacggtgaaaccccgtctctactaaaaatacaaaaaattagccgggcgtggtggcgggtgcctgtagtcccagctactcgggaggctgaggcgggagaatagcgtgaacctggaagg

SEQ ID NO: 1255 - DNA, 248 bp, Homo sapiens
gatgactccaggtggatgaagaccacagagaaaggatgggaattccacagtgtggagctaaatcgaggcaataatgtcctctattggagaaccacagccttctcagtatggaccaaagtacccaagcctgtgctggtgagaaacattgccataacaggggtggcctacacttcagaatgcttcccctgcaaacctggcacgtatgcagacaagcagggctcctctttctgcaaactttgcccagccaa

SEQ ID NO: 1256 - DNA, 207 bp, Homo sapiens
aactgacgcttatagaaaagactaggactttaattgaactagaagacgtataggtagaagctgaagaaaagagcaagtcaaagaaagctatgaagttaggagtaaatggatactgtcagtggtgtgctggtaaatgcttaacaactggctctctagggagagtgaaaggaagccctgatttatagtgtaggctgaattccatggtgt

SEQ ID NO: 1257 - DNA, 240 bp, Homo sapiens
aaaaaagagttgaactgacgcttatagaaaagactaggactttaattgaactagaagacgtataggtagaagctgaagaaaagagcaagtcaaagaaagctatgaagttaggagtaaatggatactgtcagtggtgtgctggtaaatgcttaacaactggctctctagggagagtgaaaggaagccctgatttatagtgtaggctgaattccatggtgtaaatactcccatcacagtcaa

SEQ ID NO: 1258 - DNA, 145 bp, Homo sapiens
acccagagagggcacaaagaattcccatcctgatgttctttctttcctagatgacattgacatttacatccaaagccaaagattttggtcaagagttaatttattggctgggcatggtgttgcatgtagtggctcctgtagtttc

SEQ ID NO: 1259 - DNA, 190 bp, Homo sapiens
ctcctcaccttgcatagcacctttgcaagcctgcggcgatttgggtgccagcatcctgcaacacccactgctggaaatctcttcattgtggccttatcagatgtttgaatttcagatctttttttatagagtacccaaaccctcctttctgcttgcctcaaacctgccaaatatacccacactttgtttg

SEQ ID NO: 1260 - DNA, 235 bp, Homo sapiens
aaaagcataaaaagaggccgggcgcggtggctcacgcctgtaatcccagcactttgggaggccgaggcgggcagatcatgaggtcgggagattgagaccatcctggctaacacggtgaagccccgtctctactggaaatacaaaaaattagccgggcgtggtggcgggtgcctgtggtcccagctactcgggaggctgaggcgggagaatagcgtgggcctggaaggcggagctt

SEQ ID NO: 1261 - DNA, 246 bp, Homo sapiens
gattgtggtgtattcaagcagtagggtttttgcttttgtttttgttttagtgccaacaaaacttttttttgtctgactacattaaagataagactgactatatttatacaacagaaactttgtaatagattttttcagctttgtgaaatcgaattttttttcatcagggctggttggatttcctttttaccctgtaatccaagcgttaatagtttgttagaagatgggttattgcatgtcactttt

SEQ ID NO: 1262 - DNA, 248 bp, Homo sapiens
tgccttatcacatggtcaagtaccttgccaaataaaggaaagcaaatgatttgggtctcaactgaagatgaagctcaactcaggaagagatttatctgtatatacacataactgaaaaccaagtttaagcccaccaatgcactgctgatgcatgccatataattaatgggtaacttttattctttatgatgtctacataacaagtgtgatttggaaggcacatgtgagcatatgcattatgatccaat

SEQ ID NO: 1263 - DNA, 245 bp, Homo sapiens
  misc_feature (79)..(79): n is a, c, g, or t
ggcagggtcagatgattacacaaatttggtaggggcatttgtatgccagtcaacaattattccttctgaaagtaagggntttccgagcagccttatcatcacaatccatcattctggcagatacattcataggagtcacagttgaaaccacattgaaaaatattaatataaaagaagatatgttcccagttccaacaagccaaataccagatgtgcatttcttttataagtcttctacagcaaca

SEQ ID NO: 1264 - DNA, 277 bp, Homo sapiens
  misc_feature (197)..(197): n is a, c, g, or t
  misc_feature (236)..(236): n is a, c, g, or t
  misc_feature (238)..(238): n is a, c, g, or t
ggacaatgaaatggttagctacaattttcccatacaaacataaaacaatattcatatagaataaacaccctcacaaataactgatgggtgatgaacacacaccaagttcgaccaaagcaaaaaataaactgaaaattgttgggtggggttattcatattttaaattcaacatgcttgctctatttaaaaatacctgnagaagctcataattaaaagcttctattttcagaccttgncnaaaaagggtttttccaatggtaacgggaaaagcaccttt

SEQ ID NO: 1265 - DNA, 300 bp, Homo sapiens
gttactgtggcccatgtcctaaaaactggatatgttacaaaaataactgctaccaattttttgatgagagtaaaaactggtatgagagccaggcttcttgtatgtctcaaaatgccagccttctgaaagtatacagcaaagaggaccaggatttacttaaactggtgaagtcatatcattggatgggactagtacacattccaacaaatggatcttggcagtgggaagatggctccattctctcacccaacctactaacaataattgaaatgcagaagggagactgtgcactctatgcct

SEQ ID NO: 1266 - DNA, 249 bp, Homo sapiens
cctcgagctttaaaggctatatagaaaactgttcaactccaaatacatacatctgcatgcaaaggactgtgtaaagatgatcaaccatctcaataaaagccaggaacagagaagagattacaccagcggtaacactgccaaccgagactaaaggaaacaaacaaaaacaggacaaaatgaccaaagactgtcagatttcttagactccacaggaccaaaccatagaacaatttcactgcaaacatgcat

SEQ ID NO: 1267 - DNA, 239 bp, Homo sapiens
tatcttaaaggcattattctccagccttaagatcttaggacgtttcctttgctatgatttgtacttgcttgagtcccatgactgtttctcttcctctctttcttccttttggaatagtaatatccatcctatgtttgtcccactattgtattttggaagcacataacttgtttggtttcacaggttcacagttaagaaggaattttgcctctgaataaatagaatcttgagtctcatgc

SEQ ID NO: 1268 - DNA, 296 bp, Homo sapiens
tcttcattttgggaaactaggttctataaaatatttatcctccctgttatactttggagcacagcacagccagaaaggggctgcatttgtgcccaggtcaggagcaaattgaaaaaaaaaataaagtaatactaaaaaatcaaactataaacccaaaacatttattaaaacctgaattaatcctttttggagggaggagtagagatatataacctgaaaatacttattctttcttatcgaattttggagcctaatatagccaggagctgctgaatttgtgcccctggattggaacc

SEQ ID NO: 1269 - DNA, 249 bp, Homo sapiens
agaggagcagtgtgtagtcccctgtttgacagggctgggacaggtgaaatttctttgagcctagtggttacttgggaagttaactaagcttgggtggttttgccagtttcttcctccccacacaggaagattgctccaaaggaaagaaggtcaagccagaacctctagagaattggaaggtgaaaaatgttgagtccagtttgtttcccaaatcagcggactgagaagttggaggcactaaagggaatt

SEQ ID NO: 1270 - DNA, 234 bp, Homo sapiens
ggctaattgttgaactggtgtcgtagaagaaattgtctacaggagccaaggtgaaagtctctgatgacggcggaactggctccattagaccatggttcatcctcttttaaaaccaaatttttttttcttctggcctacaagtattttttttttaaaaaagaaaaaaagcctacattggcatcaagttctgtatcaatccatcttacattgccatccatgatttaacagactgta

SEQ ID NO: 1271 - DNA, 210 bp, Homo sapiens
gggaaggatcttattgcacttgggctgttcagaatgtagaaaggacatatttgaggaagtatctatttgagcactgatttactctgtaaaaagcaaaatctctctgtcctaaactaatggaagcgattctcccatgctcatgtgtaatggttttaacgttactcactggagagattggactttctggagttatttaaccactatgttcag

SEQ ID NO: 1272 - DNA, 159 bp, Homo sapiens
  misc_feature (55)..(55): n is a, c, g, or t
gagctctttctctccgaagagcggtagcttggccggcccacgttccgctccgctntgcgctctcccctccccggctctctcctggaaggttatttgtagcctctttggcgtgttgggacagcggccctactggggtaggaatgtagctgttcttcccac

SEQ ID NO: 1273 - DNA, 208 bp, Homo sapiens
gtggcgctgtagcagcggcaggctgctgggcagccggcggcgcggagcggcagtagtagcagcagcagcggcagcagtgcgggggccctcagggccatctcccgaggcccggttcctcaccggcccttccgcggttcagccgcagacgcgtgccctcctgaaacacaggttggcaggccagtctcggcagtcgagagccagccaatag

SEQ ID NO: 1274 - DNA, 109 bp, Homo sapiens
aacatagcaaatggcatcactgtgtttgacttcttgtgaaatttctgtactttgtatataaaatacataaaacaatagattagaaatcaaaagatatctctggcctgca

SEQ ID NO: 1275 - DNA, 191 bp, Homo sapiens; identical to SEQ ID NO: 48

SEQ ID NO: 1276 - DNA, 195 bp, Homo sapiens
agctctggacgccccgcacggggggcctcgaagagttcagggcggtgccgcggcgctcgggccgggtctcccggggcgtggggcggggggcggggttgggcggcggccgggggctcctccctcttctgccccgggctcccctgctcttaacccgcgcgggggccgccaggccactgggctccgcggagccagcga

SEQ ID NO: 1277 - DNA, 169 bp, Homo sapiens
tggagcagctctcgagaactacctgttggtattgtccacaagctctcccgagcgccccatcttgtgccatgttttaagtcttcatggatgttctgcatgtcatggggactaaaactcacccaacagatctttccagaggtccatggtggaagacgataaccctgtgaaa

SEQ ID NO: 1278 - DNA, 59 bp, Homo sapiens
agtggttttgccctgcttcccgcaagaggtggcacccacggctggaacgcaggagtcag

SEQ ID NO: 1279 - DNA, 145 bp, Homo sapiens
cttccacttgccctgatggattcaaaatccttatgaaacagacgtggcagagtaaacctcgaaaccgaccttcttttcggcagacactcatgcatttagacattgcctctgcagatgtacttgccaccccacaagaaacttactt

SEQ ID NO: 1280 - DNA, 236 bp, Homo sapiens
ggctcttcaccttcagagtgaccacttcccagactctggaagtgggaagaccctctttgacgctttattacagtaatttgagctcctatcgacttggagcgaatgaatttctcttttgtggttaggtctccaaatgaacctccttacctggctcccctctggtctcctgtactgtcagtccccagctcccagtgttgttttctgatgccggctccctctctgtattgaacggcaat

SEQ ID NO: 1281 - DNA, 136 bp, Homo sapiens
acttcaagtctcaggtaagttgggaaacttcctaccaggtgctactaaacagatagagaactctcaatgaaacagagtaactcttagaagggcccattgtgtttgttataatagttatataactccattcattgtg

SEQ ID NO: 1282 - DNA, 243 bp, Homo sapiens
atggtttcagttacgctcaacagcagtccaaaaatatttgatggaacattccagaaataaacaattcataaattttaattgcacagcattctgaggagcatgatgagatcttgccccttgctgccctggaggtgatcctccctctgtccagcatattcatgctgctcacccattagtcacttagtagcagtctcggtgatcagatcgactgtctcggttatcagatgactgtatcgcagtgct

SEQ ID NO: 1283 - DNA, 285 bp, Homo sapiens
agcatcaagtaccacgtttttgaagaccatggcctatcatcattatgcattcaagatttgagtttgaataacctcatcaagacttagatcttcttcagaagcttcaagtttcatctgcattaaagctctccattgaaccctctcacaaaagtacaagcttaaaggggctaaaatccattaatacattccattttatatcccttcctctgacttctcttcaatttccttggcctctagggtccttcatattgcttacgttcctttagactagagccaaggagacag

SEQ ID NO: 1284 - DNA, 275 bp, Homo sapiens
tctacgaggtcttacgagctggcaggaagatcacacctcgattgctagtagactggtccacaggaattgcaagtggaatgaattatttgcacctccataaaattattcatcgtgatctcaaatcacctaatgttttagtgacccacacagatgcggtaaaaatttcagattttggtacatctaaggaactcagtgacaaaagtaccaagatgtcatttgctggcacggtcgcatggatggcgccagaggtgatacggaatgaacctgtctctgaa

SEQ ID NO: 1285 - DNA, 93 bp, Homo sapiens
taattctaagaaggagcacgaatatatattcccctaaaattatagcttagcattgtcaatgctttagagcagttatgggagttatagattata

SEQ ID NO: 1286 - DNA, 255 bp, Homo sapiens
caaagtcagtcaaaccagagccatgtcctggggaactgtcaaaagaatggttcctaagggccagaggccacatccactggtagatgacagaacaaccatacttcagatggcaaaaccggtcagtttggtttgcgttgtgtgcctatcctctttctgtgtgcttcagctgaattaagtgcttggagagctcaaatagttcaagatagccaagatgaccaattctgccaggtggcagcctgatcttgcaattttgat

SEQ ID NO: 1287 - DNA, 246 bp, Homo sapiens
  misc_feature (29)..(29): n is a, c, g, or t
cccagcattttgtctgggaagagagactnacccatctttacccaccccctagaaatgagctgcaataacaggaacatgagacttcgcaaatctctggaaaataatatccaaatgaaattaagtctcactgaacatttcaatcaagaatggcagggatctattttattgaatattctagctactgtaacattgatatttatttttgtttgacattttaacactttgtactgcaaagagtgaactata

SEQ ID NO: 1288 - DNA, 257 bp, Homo sapiens
gggaatgactaaacatccatgcttgatacaatttatctgaattttgttttgttttgtttccccctccagtgaaaggtaaatagacgatgaggcttatcagacaccttggatttttcctgattatatttccatcttctccttggcccatgaaaatctaatcctgaatgtttaactactttttaaattatttttaacttttttctaatgtgcgatacttttgggggatgctttcatatttaccaacacctcctttatga

SEQ ID NO: 1289 - DNA, 268 bp, Homo sapiens
aaaatggaggcacataatttgggtggaaaatggcgattaaaaatatatataagaaaattattagccatgtgtaacatatttaaataatgaccagaatatttcatgagtaccaactcttcccatagtaattttcctccaaaatgcaatagctcattccctcaactgcagacgctttgattttttttcaagttatagtgctgtagtgcttgtttatgtttaaaagtgcacattatgcagctcattttagtatgctacttctatgtttatt

SEQ ID NO: 1290 - DNA, 203 bp, Homo sapiens
  misc_feature (106)..(106): n is a, c, g, or t
  misc_feature (128)..(128): n is a, c, g, or t
  misc_feature (153)..(153): n is a, c, g, or t
tgtatggagattttcaggaagcccaagcataggactcagtttgacatacttcctaaaatattatgtcaactctcaagttttacttgcatcagtattaagttggctnatgaggaaaaggaattatttgntttctgatttgaggcaggagtttgntttttgcccagacagtgagtgaacttgaagggcttagaaataaagggcct

SEQ ID NO: 1291 - DNA, 236 bp, Homo sapiens
accttatggctacagaagacgatgattaacccatagaggttcaatgtagttttcaagaagagggtgggaaagcataagatggggactaagactttgcctttaaccttcatgacatgaagaattgaatgactctttgttggaaaaaatggcagttatgagataattggatccatgttaattatatatatttctgtatatatagtaagtggttattgatgtgcctttgttaaccattt

SEQ ID NO: 1292 - DNA, 230 bp, Homo sapiens
aactagtaactaccatccatcctatttgaattatcaagcagaacatgaccataaaatttggtaacttgttacattactctttgtgattttctaataaccatgctaagtgtatttccacagtgagcttttggcttactatatacattcttggtggataaattgttcatctgtttttgaagtgttaccttactattttgtttacaagatagtctattgggttgattcaggat

SEQ ID NO: 1293 - DNA, 226 bp, Homo sapiens
tatgtgggaatgactaaacatccatgcttgatacaatttatctgaattttgttttgttttgtttccccctccagtgaaaggtaaatagacgatgaggcttatcagacaccttggatttttcctgattatatttccatcttctccttggcccatgaaaatctaatcctgaatgtttaactactttttaaattatttttaacttttttctaatgtgcgatacttttgg

SEQ ID NO: 1294 - DNA, 267 bp, Homo sapiens
ttccctccccaaatggacagtcttctctgttgatcacagagggagcctgagtacaggcttggagaaatggctaggacagggaacagggaagcacttacaattattccttgatttattcaaaagaactgggaaagatggttgtagttgtctttagcttcggttcaactgagtttcgttttgttaaacagttcagtgaaggagaaagcacctgtgatatatggcaagtgtccccctgcccaaactttaacatcagaccctctcacatca

SEQ ID NO: 1295 - DNA, 148 bp, Homo sapiens
aagtttctggactagtctcccaacgtttgcctcccaatgttgtccctttccttcgttcccatggtaaagctcctctcgctttcctcctgaggctatacccatgcgtctttaggaactggtcacaaaagtcatggtgcctgcatccctg

SEQ ID NO: 1296 - DNA, 245 bp, Homo sapiens
gtacttaataggaagcttccaaaagaagaaaaccccacaagttttccattttcttaaagtaggaaaaaatgaacagtaataattatgatgaagatgatagtagtgctatgggatgtgtggactgtttagtgtgttcccctttgtgggtgggttcctatgatacttattatagaacacagtggatcctttttgaatgttcgtggaagggccaggagttcctgtgaaaccaggatactgcagcttta

SEQ ID NO: 1297 - DNA, 276 bp, Homo sapiens
agaattcagtgcaagttacaaaaattctgttgcaccactctagttttagtatttctattttaatacatttgtttaccacttgtttatgtatatgtaggtgatgttacttgagcttaaatgtactttactgagcaaagtttaaaaaacaaagtatattttattttatgataaagggcctttaacctcatggtcaaatactaatattatatttgctgagacaagatttgaaattgtatcaagagttttatttttctgacatttaaagttctacataat

SEQ ID NO: 1298 - DNA, 129 bp, Homo sapiens
  misc_feature (75)..(75): n is a, c, g, or t
gggatcatgggggaatagttagtaatgacagggatagttgaacttaaaaaaaaagtttgtgaggctgacaaagangaaacggacacatttcctgatcttggagggttcatagggtagaagatggtagat

SEQ ID NO: 1299 - DNA, 262 bp, Homo sapiens
  misc_feature (54)..(54): n is a, c, g, or t
gtaatgacagggatagttgaacttaaaaaaaaagtttgtgaggctgacaaagangaaacggacacatttcctgatcttggagggttcatagggtagaagatggtagatgacagctgggtgtggtggcactcgcctgtagtcccagctactcaagaggctgtggtgggaggattgcttgagcccaggcattcaaggctgcagtgagctataatcatgccactgcattccaactgagtgacacagcaagactcctctcttaata

SEQ ID NO: 1300 - DNA, 220 bp, Homo sapiens
tctgatgtcagatcttgggtccactggctccactgagggcgcctagactctacagccaggcagctgggattcaattccctgcctggatctcacgagcactttccctcttggtgcctcagtttcctgacctatgaaacagagaaaataaaagcacttatttattgttgttggaggctgcaaaatgttagtagatatgaggcgtttgcagctgtaccatatt

SEQ ID NO: 1301 - DNA, 117 bp, Homo sapiens
  misc_feature (80)..(80): n is a, c, g, or t
cctgattttcctctattgttagagccactggataaagacagagggtcagggactggaccatccagtgttgtaatcagggnaagtagaggaccctccgacagaatcctgagcctgtgg

SEQ ID NO: 1302 - DNA, 240 bp, Homo sapiens
acacagctcggatttcagcctttgatgtcagctcttgggtccactggctccactgagggcacctagactctacagccaggcggctggaattgaattccctgcctggatctcacaagcactttccctcttggtgcctcagtttcctgacctatgaaacagagaaaataaaagcacttatttattgttgttggaggctgcaaaatgttagtagatatgaggcatttgcagctgtgccatatt

SEQ ID NO: 1303 - DNA, 124 bp, Homo sapiens
gtcaagcaaaggtttttgtaatttcaggtctataattttaataggatttcctataatattgtaaagcattttatatgaaacaggaacacaaatttctcaaaattcatgcgaagtccaataaaga

SEQ ID NO: 1304 - DNA, 240 bp, Homo sapiens
  misc_feature (114)..(114): n is a, c, g, or t
  misc_feature (184)..(184): n is a, c, g, or t
  misc_feature (193)..(193): n is a, c, g, or t
  misc_feature (202)..(202): n is a, c, g, or t
  misc_feature (210)..(210): n is a, c, g, or t
atggatgaaggcatttcctgttggcacatcgtgtcctgattttcctctattgttagagccactggataaagacagagggtcagggactggaccatccagtgttgtaatcagggnaagtagaggaccctccgacagaatcctgagcctgtggtgggtgtcaggcaggagaggaagccttcagggncagggctgncccctctgnctcccagnctgcccatcctggagagttccctcctgggc

SEQ ID NO: 1305 - DNA, 188 bp, Homo sapiens
ccatgcctgtcctattttcttatgttttaatatattttaatatattacatgtgcagtaattagattatcatgggtgaactttatgagtgagtattttggtgatgactcctcctgaccagcccaggaccagctttcttgtcaccttgaggtcccctcgccccgtcacaccgttatgcattactctgtgt

SEQ ID NO: 1306 - DNA, 33 bp, Homo sapiens
cctgcaggtcctggatcaacacccagttgggac

SEQ ID NO: 1307 - DNA, 68 bp, Homo sapiens
gaagggatggtacgtggaggggaatgggtggtgggaccagggacccaatgctaataaagactggactg

SEQ ID NO: 1308 - DNA, 211 bp, Homo sapiens
  misc_feature (29)..(30): n is a, c, g, or t
  misc_feature (123)..(123): n is a, c, g, or t
gctcggggacctcgtgtgacaggtgagcnncttacggcccctccctaccctgcccagatgcctgaaaggcctccatggctttcctgcccttcctggttccggacagctggggaaaggccacancagctcctctgctgccctgcagtctttgggggcggggagggctggacatgtggaaccctgatgcagccgcagcgtcaaggacgaggaa

SEQ ID NO: 1309 - DNA, 262 bp, Homo sapiens
ggaatgcgccaagcataaaggtggggcatggcatcaaaaggtaggtcaacatattaaataattccatgtattgaaatatccagaaaatatatagacagatctatagagatagaaactggtctgcccaggactaggggttgtctaaggataaggagcttcttttttggatggtgaaataacctaaaatatattgtgccattgtttgcacaactttgtgaatatattaaaaacctgttaattgtactcactaaatgtcctcctt

SEQ ID NO: 1310 - DNA, 239 bp, Homo sapiens
taacatgcattcctactattatgatagtttttaaggtttcaattcaatcttctgaacggcataagtcctattttagccttacctcctgcatttgcaatacgtaatactgatcagtgggcacagttcttcagctacattgagaccctgaaatgaacaattatattctgactcgacatcttgtccccaatccttccaaaaatattgatggtgatttgtgctaccatttactcgtttattta

SEQ ID NO: 1311 - DNA, 264 bp, Homo sapiens
  misc_feature (103)..(104): n is a, c, g, or t
  misc_feature (106)..(107): n is a, c, g, or t
  misc_feature (109)..(122): n is a, c, g, or t
  misc_feature (158)..(158): n is a, c, g, or t
  misc_feature (225)..(225): n is a, c, g, or t
  misc_feature (228)..(228): n is a, c, g, or t
gtgtgtctgtgagagctagctgccttacccctccttggcacatagtaggccttccataaatgttggatggatggataaatagattgggaccatcagaccatgnnannannnnnnnnnnnnnnctgtaggagtgatgacagctcagcgtccccactcantgtatctgaccatgtgtgtaagtgcacaaaaatgtggttgtagatgttgctctacattcaaaccttncangctacactcttccatcagcatgagtcctggagagct

SEQ ID NO: 1312 - DNA, 270 bp, Homo sapiens
cactcaatggcctagaagctgcctgtactttggggaaacagatggagctcttgggcccagccagctgggcctgggacttctgcctctgccgcctccagagtggcctggcagctttgccagaggctgtggagcgagggtagtaggagcttttcccagagtgctgtgacttgcatgatggattttaggctgtggcaagggctgatttctgggatagggggagggttggaaaatttatttttatgaaacagagggaagactttattgttgtta

SEQ ID NO: 1313 - DNA, 215 bp, Homo sapiens
aaggggattaacataacttcatttcattgccttatattaacattttataatacaatagtttaagattaagggaaacagatggagctgtttattgagacaactggtgaggaattatcatgtgttcattcccattttagagcgtgaaactcctacattagaatatataaagtcactttaaatatctatatttgtaacagaagtagtgtacagatatt

SEQ ID NO: 1314 - DNA, 227 bp, Homo sapiens
ttcagccgggtcttcaaaactgtaggggggaaataacacttaagtttctttttctcatctagaaatgctttccttactgacaacctaacatcatttttcttttcttcttgcattttgtgaacttaaagagaaggaatatttgtgtaggtgaatctcgtttttatttgtggagatatctaatgttttgtagtcacatgggcaagaattattacatgctaagctggtta

SEQ ID NO: 1315 - DNA, 198 bp, Homo sapiens
ttaaactatttctaggtttgtgaatgtgaagccccaggccgcagggggcaaggggccaggtgccccccaccagctgagaacaaagtgtctatctgggtgtgggcccctggccgcctccctccagccctggagaggagggcagggctgcggggaggccaggccgagcccctggaaccatcccgtcctgtatcatatgta

SEQ ID NO: 1316 - DNA, 183 bp, Homo sapiens
agctgagtcctgagacacttagcttccctctccctcattcccggacccttccaccccactgggcccaaccatgggctcaggaccctggaattccgttttctgatttgctttgggattttttttttttttaagatgttacatggtgtttcgaagccagcaagttaccatcctccggtgtctctt

SEQ ID NO: 1317 - DNA, 220 bp, Homo sapiens
ttctacacgtttgagctgagtcctgagacacttagcttccctctccctcattcccggacccttccaccccactgggcccaaccatgggctcaggaccctggaattccgttttctgatttgctttgggattttttttttttttaagatgttacatggtgtttcgaagccagcaagttaccatcctccggtgtctcttctctccacatctgtaacttctttt

SEQ ID NO: 1318 - DNA, 76 bp, Homo sapiens
gctcccaagtacaaatagagtgacccgtaaaatccaggattttttgttttttgctacaatcttgacccctttgcta

SEQ ID NO: 1319 - DNA, 155 bp, Homo sapiens
gctgtgcctgatgtgggaacagcttttctcccagatgtaaatagaacaacctgcacaacctggatttttttaaaaatacaacactgagccatttgctgcatttctttttatactaaatatgtgactgacaataaaaacaattttgactttaatct

SEQ ID NO: 1320 - DNA, 133 bp, Homo sapiens
ctgtgcctgatgtgggaacagctcttctcccagatgtaaatagaacaacctgcacaacctggatttttttaaaaatacaacactgagccatttgctgcatttctttttatactaaatatgtgactgacaataa

SEQ ID NO: 1321 - DNA, 44 bp, Homo sapiens
gcagggaggtgcccggtcaagtctactgccacctctcactctcc

SEQ ID NO: 1322 - DNA, 250 bp, Homo sapiens
gttataatcaacatcgtaatcatcataatcatatagaactgttccatcagcacaaaggaactccttgcgtcatccctttatagtcatacataccccacaccccctccagtccctatccctggcaaccattaatctgttcttcatttcaataattttgtcacctcaagaatgttatataaatgcgatcatacagtatgtgaccatttgagactggtttttttttttgttcaccataatacccctgaggtac

SEQ ID NO: 1323 - DNA, 235 bp, Homo sapiens
ccaagggaagatctgtcgtctgttcaggatttgaaaaagaagaggaagaaaacctaacacggaagtctgcatcaaagtaaagttcttctgaagtgctgctccatgtttccaccaaatgaattttttttatcctcctgactcttcaggccaggtagcagcaaatagcaaatgaaaaagtcagctacaaaagttaatgaatatgccatctatgcagaacaggcagaaatataaacac

SEQ ID NO: 1324 - DNA, 277 bp, Homo sapiens
gacattacaataaccaatagctgttgcagaccaggagctcattttatctccttcgcagggagcttagggagcacaggtcagagcggaagaggccagcctgcaaggtcagctggagctgcaggaaagtttcttcttttgtgtgtcttttaaaaaaataaacagctttatggagacataatttatacacaattcacccatttaaagtgaacaatttaatgacttttagtatagtcatagagctgtacaaccatcactgcagtcaacttagaatattttc

SEQ ID NO: 1325 - DNA, 256 bp, Homo sapiens
cttctgcgaatgatagagccaggctgcgccgtcggctcctctagcctaacgttggtttacagtattcaaaaagagttgattgaattcaaggttttttttccatgtaaagctatttatatcttccaagcctaatgaaatggatattataaaaatacagttgattcatcctatgtttgggaagagtatttttagtgtaattattttccagcaattgtaagggcatatactgcttgtctcagaagaaaattccacgtag

SEQ ID NO: 1326 - DNA, 187 bp, Homo sapiens
ccccaccctcagatgcacatgagctggcgggattgaaggatgctgttttcgtactgggaaagggattttcagccctcagaatcgctccaccttgcagctctccccttctctgtattcctagaaactgacacatgctgaacatcacagcttatttcctcatttttataatgtcccttcacaaacccag

SEQ ID NO: 1327 - DNA, 96 bp, Homo sapiens
tagtgtggattgttgggagtacaaatcattccaaaagtttaaagaaaaatgcagcattttacacagtgaacagtgctactgtatcacattcataca

SEQ ID NO: 1328 - DNA, 131 bp, Homo sapiens
tccagaaagtgttcatgctcatttctaatgggcatgcacttgagggcaaggagtgtattatggtacaatttctttggtaaaactaaaattggattcacaaaacttcatactcgagtacgtttttaagaagg

SEQ ID NO: 1329 - DNA, 246 bp, Homo sapiens
tggtggtccccagtaatgtggacatcgccaccacagaggctctcagcatggcccaggaggtggaccccgagggagacaggaccatcggaatcttgacgaagcctgatctggtggacaaaggaactgaagacaaggttgtggacgtggtgcggaacctcgtgttccacctgaagaagggttacatgattgtcaagtgccggggccagcaggagatccaggaccagctgagcctgtccgaagccctgc

SEQ ID NO: 1330 - DNA, 191 bp, Homo sapiens
tctctgcactgtgcatagttcctctctgccaccaccatggaggagattgatgggtttgaaacccaggggaaggtcattgccctgcgagggtctccctcattgagaatctggatcccctcatgtgcacatggtgaggtcagagtcccctcctcacagtgtcccctccaccctcccgtgaactgttctttcct

SEQ ID NO: 1331 - DNA, 82 bp, Homo sapiens; identical to SEQ ID NO: 193

SEQ ID NO: 1332 - DNA, 256 bp, Homo sapiens
gacacactgccggatccagaggggtggacatcagtggtgggtctgtgatggcggcaaacaacagcagacagcaaatggcagtggtggatggcaagcgaaagctcagctccagccataacaaacacggaccagaagagtgtgcagttgcaagatttaacagagtgaaaacagacgtcccatacaaagggagggaacccaaagggggttgccattgctgggtcgaatgcctgggtttctgtctcaatcactgtccctc

SEQ ID NO: 1333 - DNA, 300 bp, Homo sapiens
gaacttttttatgcttaccatcttttttttttctttaacagatttgtatttaagaattgtttttaaaaaattttaagatttacacaatgtttctctgtaaatattgccattaaatgtaaataactttaataaaacgtttatagcagttacacagaatttcaatcctagtatatagtacctagtattataggtactataaaccctaattttttttatttaagtacattttgctttttaaagttgatttttttctattgtttttagaaaaaataaaataactggcaaatatatcattgagcc

SEQ ID NO: 1334 - DNA, 164 bp, Homo sapiens
cagcgggcgggcactttgcactggaacttacaacacccgagcaaggacgcgactctcccgacgcggggaggctattctgcccatttggggacacttccccgccgctgccaggacccgcttctctgaaaggctctccttgcagctgcttagacgctggatttttt

SEQ ID NO: 1335 - DNA, 94 bp, Homo sapiens
tgagcaatcacctatgaacttgtttcaaatgcatgatcaaatgcaacctcacaaccttggctgagtcttgagactgaaagatttagccataatg

SEQ ID NO: 1336 - DNA, 261 bp, Homo sapiens
ttcggctcaccgcatttctgacagccggagacggacactgcggcgcgtcccgcccgcctgtccccgcggcgattccaacccgccctgatccttttaagaagttggcatttggctttttaaaaagcaataatacaatttaaaacctgggtctctagaggtgttaggacgtggtgttgggtaggcgcaggcaggggaaaagggaggcgaggatgtgtccgattctcctggaatcgttgacttggaaaaaccagggcgaatctc

SEQ ID NO: 1337 - DNA, 233 bp, Homo sapiens
taagatttacacaatgtttctctgtaaatattgccattaaatgtaaataactttaataaaacgtttatagcagttacacagaatttcaatcctagtatatagtacctagtattataggtactataaaccctaattttttttatttaagtacattttgctttttaaagttgatttttttctattgtttttagaaaaaataaaataactggcaaatatatcattgagccaaaaaa

SEQ ID NO: 1338 - DNA, 238 bp, Homo sapiens
tttaagatttacacaatgtttttctgtaaatattgccattaaatgtaaataactttaataaaacgtttatagcagttacacagaatttcaatcctagtatatagtacctagtattataggtactataaaccctaattttttttatttaagtacattttgctttttaaagttgatttttttttattgtttttagaaaaaataaaataactggcaaatatatcattgagccaaatcccaa

SEQ ID NO: 1339 - DNA, 153 bp, Homo sapiens
agtcatgtcccgtctgcaggtcgcgtgtggagcatgtccagcacgtctatctgccaacgcacaccagttttttcaatctgactgtaatttaatctgttgtgcttttgttggacttggcatgtttccatgaactgcactattataaactattaa

SEQ ID NO: 1340 - DNA, 249 bp, Homo sapiens
aagctagaaacctacactgtcactttactgagatttctgagtatacttttcatattgccttaatgtagcagtaatgtgtttatgcatttgtttctttgcacagacattttgtcaaatattaaaactttacttttttatggcacatattagcatataagcctttattccaagaggtatttattttttcacttgtaaaaaaataatgtttccacgtaaagaactctgttatatcctagaggactctgtctt

SEQ ID NO: 1341 - DNA, 227 bp, Homo sapiens
ttaagtctcagaatctcccctagctccctccaggtgtctgcagtggttgtcccctcaaagctgtcccacaccctcctccgaggaccctttgtgtatctcctccagctaccgcagagcccacaaacccaggcatctatcaaagtccctcattcatgagggtggtgaggacacagactgcgaccagaacagaaatatgaaaatgtgaatgacagcgtcccccgtgtgtg

SEQ ID NO: 1342 - DNA, 64 bp, Homo sapiens
tgtggatcctagacagcgccttatctatgattgagtgtccgtgtaaataaattcctacttagac

SEQ ID NO: 1343 - DNA, 63 bp, Homo sapiens
tcgagggacatcctttccggaaagactttcctctatctggctatgttgagttacgttatgatg

SEQ ID NO: 1344 - DNA, 47 bp, Homo sapiens
gtgtaacattaactatgaacttaccacccagaatttacaaatgctga

SEQ ID NO: 1345 - DNA, 281 bp, Homo sapiens
  misc_feature (220)..(221): n is a, c, g, or t
  misc_feature (223)..(224): n is a, c, g, or t
  misc_feature (226)..(230): n is a, c, g, or t
  misc_feature (232)..(235): n is a, c, g, or t
  misc_feature (237)..(238): n is a, c, g, or t
  misc_feature (240)..(240): n is a, c, g, or t
  misc_feature (242)..(245): n is a, c, g, or t
  misc_feature (248)..(249): n is a, c, g, or t
aaatgactctggttttgagtggcctgtaatgggcagaggctccctcggggctcgggatctgcagcatctatgtggatcagcccacacccttcccagagccagggagcccttagcctcaactctgccccaccccagcctcttccaggagagcacccttacttggcccggcttccagagaccctcgaaatctccgagaagataaacagctgctacctcttannannannnnnannnnanntngnnnntanntgattgttatatgctacaagggatttcagtgg

SEQ ID NO: 1346 - DNA, 133 bp, Homo sapiens
ggcccagcaaattagagtcactagcccagccagggagagctggatgcaggctgcatccaaggcagagagtgcaggccaagcaaaggctcattgccaggaagctgtgcacagtgtatttcagtctggtgggaga

SEQ ID NO: 1347 - DNA, 103 bp, Homo sapiens
ggcccagcaaattagagtcactagcccagccagggagagctggatgcaggctgcatccaaggcagagagtgcaggccaagcaaaggctcattgccaggaagct

SEQ ID NO: 1348 - DNA, 236 bp, Homo sapiens
tctctctctactttacagtgatacacacacgtatttaaggactatccctgagaccatccttctcattttggaaactgctagggagggaaccaaccacttaaacaagcgtggttttccaagatccaggcaattgtgtgctgttggttgtggtggaggatgtggcacatatatacgtacctacacggttctctaacagagctttctgtatctatagatagatgccatctgtccatttc

SEQ ID NO: 1349 - DNA, 93 bp, Homo sapiens
tgcaggcaccactggcctcaggtggccctgtcctggggcgggagcacctgcgggagctgcccgccttggtggtgtatgagagccaggccgggc

SEQ ID NO: 1350 - DNA, 228 bp, Homo sapiens
gtccaaggactggaagtcagggctcccactgcaatcctgagaggcagggtttgtcctgagcacttggttcacacagacccggcagatgtgatgtcatttcaaggggcttctctgggtctcatcctctcatctgaggtgcagtggtgtccctgaattggctcaggtggtttcctacaaccatttgtaaagttttcaggaattttgtgaaccagttttaaatagagccat

SEQ ID NO: 1351 - DNA, 249 bp, Homo sapiens
tatcaaaatctagtaccagctacggccagaaagggccaggtgggacctgaaagcaaagacaatgttctttaccacacgtttcacatttgcaacatccttcaattgcgggaaaaggaacttgatttaacagaagaacatggtagagcagcatccagaaagtctgttattcctcttggattttttgaaataatcttcagaggaaggaaggaaaatcctattttggggtatcagtgtttgactagggatcat

SEQ ID NO: 1352 - DNA, 291 bp, Homo sapiens
gtctgtgaatagtcggttttctcagaataatttgaatctgttttcttagtttcaaatgaccatttccctgatgctctgagcttatgatcacacagagccagtccatcctcatttcctggtggcatctgttcatttacctttgtggactgtagctgatggcacagtgcgggttccctaccagccaggggtttccaagggacctttggaggccatgcttagacacattcctgtacctgagaacaaccacataggcaggaccagatccacatcgtgcagtcgtgtcataaaaaa

SEQ ID NO: 1353 - DNA, 229 bp, Homo sapiens
  misc_feature (137)..(137): n is a, c, g, or t
  misc_feature (178)..(179): n is a, c, g, or t
  misc_feature (193)..(193): n is a, c, g, or t
aaaaatgcttgtcttcctcactagacaatcaactctatgagggcagagactatgtcaccactgtcccaccagcccctggcacacagtaggtactcaataaatatatgttggaaggatggatggaggtaatggatggnaaagatggatggggagggatgaatgggaggggatggatgtnngacccagctgaagntgtgagttaggaacaattctcttattatggggtgga

SEQ ID NO: 1354 - DNA, 233 bp, Homo sapiens
tccagtctgcaccatcttatagctgcccagcacactcgactgttcatgtggtctctttgtagtgtgagtttggagtgtcctattagcctgttctggttaggaatgagttaacggctctttccctcaaccttagtctagtcccagggctgaggattcagctggatccacatggtcttgagggttggcatgaggagggggaagcttttttgaatcgctttttgatcacataatct

SEQ ID NO: 1355 - DNA, 213 bp, Homo sapiens
  misc_feature (121)..(121): n is a, c, g, or t
  misc_feature (162)..(163): n is a, c, g, or t
  misc_feature (177)..(177): n is a, c, g, or t
ctcactagacaatcaactctatgagggcagagactatgtcaccactgtcccaccagcccctggcacacagtaggtactcaataaatatatgttggaaggatggatggaggtaatggatggnaaagatggatggggagggatgaatgggaggggatggatgtnngacccagctgaagntgtgagttaggaacaattctcttattatggggtgga

SEQ ID NO: 1356 - DNA, 205 bp, Homo sapiens
agtttcctgcctggttcagctgatgccacatgtgttatataaaagtatgtacagccacatccaagggtgataaagggaagaataattagcaaatttgtaaattgtgcctccgtttttttagttttgaaacattaaattttacattttgaataatttgcatagtccagtgttggttaactttggctcctcaatgaaattagtattt

SEQ ID NO: 1357 - DNA, 242 bp, Homo sapiens
accagcgctgcgaccgcgagtgcaacagcccaggctgcggctgggacggcggcgactgctcgctgagcgtgggcgacccctggcggcaatgcgaggcgctgcagtgctggcgcctcttcaacaacagccgctgcgaccccgcctgcagctcgcccgcctgcctctacgacaacttcgactgccacgccggtggccgcgagcgcacttgcaacccggtgtacgagaagtactgcgccgaccac

SEQ ID NO: 1358 - DNA, 198 bp, Homo sapiens
ggagccagggcagatgtatgcattcctttgtgtccctgtaaatgtgggactacaagaagaggagctgcctgagtggtactttctcttcctggtaatcctctggcccagcctcatggcagaatagaggtatttttaggctatttttgtaatatggcttctggtcaaaatccctgtgtagctgaattcccaagccctgca

SEQ ID NO: 1359 - DNA, 104 bp, Homo sapiens
  misc_feature (38)..(38): n is a, c, g, or t
aggggctgtgacccaactgactacatccttcatggttntgatggctttcaccgccccctgccagcatgttgtatattaatttgttattcgtatatgttctcctt

SEQ ID NO: 1360 - DNA, 243 bp, Homo sapiens
ttggccatctccctttgggaactagggggctgctggtgggaaatgggagccagggcagatgtatgcattcctttatgtccctgtaaatgtgggactacaagaagaggagctgcctgagtggtactttctcttcctggtaatcctctggcccagccttatggcagaatagaggtatttttaggctatttttgtaatatggcttctggtcaaaatccctgtgtagctgaattcccaagccctgca

SEQ ID NO: 1361 - DNA, 278 bp, Homo sapiens
cgtgcggctccgctctggagccaaggctctaggcaaggccaggcggaaggtgaccgtcctggtcctcgtcgtgctggccgtgtgcctcctctgctggacgcccttccacctggcctctgtcgtggccctgaccacggacctgccccagaccccactggtcatcagtatgtcctacgtcatcaccagcctcacgtacgccaactcgtgcctgaaccccttcctctacgcctttctagatgacaacttccggaagaacttccgcagcatattgcggtgct

SEQ ID NO: 1362 - DNA, 142 bp, Homo sapiens
ggaacatgaaaagagactaggtgaagagagggcaggggagcccacatctggggctggcccacaatacctgctcccccgaccccctccacccagcagtagacacagtgcacaggggagaagaggggtggcgcagaagggttgg

SEQ ID NO: 1363 - DNA, 289 bp, Homo sapiens
aatttgattttaagaccctctgtgggccgggcgtggtgactcacacctgtaatcccagcactttgggaagctgaggcaggcggatcacctgaggtcgggggttcgagaccagcctgaccaacatgatgaaatcccgtctttactaaaaatacaaaaaactagccaggtgtgatggcaggctcctgtaatcccagctacttgggaggctgaggcagaagaattgcttgaacccgggaggcggaggttgcgatgagccaagattacaccacgcaccccagcttgggcaata

SEQ ID NO: 1364 - DNA, 246 bp, Homo sapiens
gcaagacttactaacgcatatcaaataaattaaaggtacaaaatcgtgaatctcagttatcttaaatattccaatactatttacaaaattattcaaattctcacgccttccaactcaaaattagcaatctaaagtaatttccatatcctagatggaaaccctcatgctaaactgtctgattatgcatggttctaaatggtttcagtggcaaatacataacattgtactactgattaaactgaactt

SEQ ID NO: 1365 - DNA, 225 bp, Homo sapiens
agaatccacatcctttcggtggcagggccaaggtccccactttcttgctgactgtaaactaaggccacttccagcttgtagaggctgcctacattccttggctcttggccccctcctccatcttcagagctagcaggttcagtctgtgtcacgaaccatttttctggttccctgcagacaggaaaggttgtccctaaggactcatgagattaggttgggcccagc

SEQ ID NO: 1366 - DNA, 149 bp, Homo sapiens
ctcctaaaaggagccctccgatgtcttctttgtcttcgttcacatcctctttgtttcctcttttcaccagcctaaggcctggctgaccaggaagccaacgttaacttgcaggccacgtgacataaccacccaaagagccagttgctctg

SEQ ID NO: 1367 - DNA, 253 bp, Homo sapiens
cacccccaatttccaaggaggtgatggggctggaaattgagttcaattttaacatggccagtgatttaagcaatgctgcctatgtaaagaaaccccaataaaaactctggacagtgaggcttggggagcttcctgattggcagacattccaatgtactaggaaggtagcgcatcttgattccacagggacaaaggctcctgagctttgggcccttccagtgcttgccaccctacatactctttgtctggctct

SEQ ID NO: 1368 - DNA, 260 bp, Homo sapiens
ccccaatttccaaggaggtgatggggctggaaattgagttcaattttaacatggccagtgatttaagcaatgctgcctatgtaaagaaaccccaataaaaactctggacagtgaggcttggggagcttcctgattggcagacattccaatgtactaggaaggtagcgcatcttgattccacagggacaaaggctcctgagctttgggcccttccagtgcttgccaccctacatactctttgtctggctcttcatttgtat

SEQ ID NO: 1369 - DNA, 165 bp, Homo sapiens
acttgatttaacagcaccaataccccctacctttagtgagcacatttgcacattccaattttaatgacagctccttagaattttttatcaacgaagacactaacaaagaatggcgcattcctccttctcctttctgaggatgccctaccctgtaacaaagtcgtt

SEQ ID NO: 1370 - DNA, 261 bp, Homo sapiens
gcttttaaagattcggctccccgtgagaaagagtcactcacatccatttttcccttgatggtccctattcctccttcccttgctttttggattttttgaaatcaatcaagactgcaaaccctttcataaagttttgccttgctgaactccctttttgcaggcagcctgcctttaaaaatagttgctgtcatccactttatgtgcattttatttctgtcaacttgtatttttttttttgtatttttccaattagttcctcct

SEQ ID NO: 1371 - DNA, 47 bp, Homo sapiens
acctgatatattccaccaggatatcctccctccagatatacttggtt

SEQ ID NO: 1372 - DNA, 206 bp, Homo sapiens
gccaaccctttcattagaacttcaagctttccaaaggctcagattataactgttgtcatatttatatgaggctgttgttttttccttttgagcctgcctttctccccccacccaggagtatcctcttgccaaatcaaaagactttttccttgggctttagccttaaagatacttgaaggtctaggtgctttaacctcacataccct

SEQ ID NO: 1373 - DNA, 296 bp, Homo sapiens
taggggtttgcaatctatttttaaaattacatcttttgctgggcacggtggctcatgcctgtagtcccaagcactttgagaggttgaggtgggaggattgctttagcccaggagtttaagactagccagagcaatattgagacccctgtctttacagaaaatttaaaaatcagccaggcatggtggtgcatgcctgtagtcccaactaatgtggaaggatcacttgagcccaggaagtcgaggctgcagtgagccgtgatcacaccactgcactcctccctgggcaatagaggaag

SEQ ID NO: 1374 - DNA, 205 bp, Homo sapiens
gtggtagctggtaattgataattatatttaaagtatgtgtattcattgtggttggtagtaatacagcatttttatctgcagatctcaaagcatgtgtgaataaatatgcattatttccctattttaagtagccagagactcactgaacgttaattagatataagcagacagagaaatttcatgtccgctgcttgcttgatgctac

SEQ ID NO: 1375 - DNA, 288 bp, Homo sapiens
acaacatccagttcctgcggcagagcgagatcggcaggaggtaacgcccgggccgcgcccgccgagccgctcacgccctgcccacattgtcctgtggcacaacccgagtgggactctccaacgcccaagagccttcctcccgggggaatgagactgctgttacgacccacacccacaccgcgaaaacaaggaccgcttttttccgaatgaccttaaaggtgatcggctttaacgaatatgtttacatatgcatagcgctgcactcagtcggactgaacgtagccagag

SEQ ID NO: 1376 - DNA, 187 bp, Homo sapiens
aaattaggtggatttacgcaagaaaataacaccatagattccggagaacttgatattggccgaagagcaattcaagagattcctcccgggatcttctggagatcacagctcttcattgatcagccacagtttcttaaattcaatatctctcttcagaaggatgcattgattggagtatatggccgga

SEQ ID NO: 1377 - DNA, 293 bp, Homo sapiens
tgcttttacaagaaatagtgaccttggggaatatgtaaacaaaagacctttttctaagagttgggagggggtgggggactgtataatgaaaagaattagcttacaaaaaagaaattgatattcaaagtattttaggcaaagccagtcaaaatgctttcatgatattttgagatgtaaattttgtctgatttgtattgttcttttcatttgccttcttaactttatatgtgacctgaattttccataacttgatgactatagattgcacctaggcattccaataaaagccaacc

SEQ ID NO: 1378 - DNA, 299 bp, Homo sapiens
tgcttttacaagaaatagtgaccttggggaatatgtaaacaaaagacctttttctaagagttgggagggggtgggggactgtataatgaaaagaattagcttacaaaaaagaaattgatattcaaagtattttaggcaaagccagtcaaaatgctttcatgatattttgagatgtaaattttgtctgatttgtattgttcttttcatttgccttcttaactttatatgtgacctgaattttccataacttgatgactatagattgcacctaggcattccaataaaagccaacccaatgt

SEQ ID NO: 1379 - DNA, 250 bp, Homo sapiens
tacatagcacatcattcctcctatagggatgaactttttcctggcacgaaaagtagccgctttggttgaagctttgcttattgtaacaggcttttatttccaggtaatatgtcttggaagacttaattttgattagagatatagatattactggaaactaattgttttttttttattgtactttgctttatcaaagaagtaaaacatttaaatcgtactacagaaattaagatgttgtcttgcgatcctt

SEQ ID NO: 1380 - DNA, 193 bp, Homo sapiens
tacagatgtgggagcattatgcagctggcaacaaacctgaccacatgattaagcctgttgaagtcactgagtcagcataaataaagactgcacaggagaattacccctatacctgagcctcaaccttttgggggaaagggaactagataacatactttttacttgtctgtacagtaccttgttgcagatgggt

SEQ ID NO: 1381 - DNA, 239 bp, Homo sapiens
tgaaaacatgacaagggcccgtagttgtttggataagagaactccagcatagagccttatagcaactgacttcccagttaagtcccagtgtaagggttggtctttggttggcagaactgaacatggtggtttgcacttgggttctggtggcgcaggcgcaggagcagccagctgtggcagcgcattagttttggcgcaagcgagcctatgctgcagggtcacttttggctggtcagaga

SEQ ID NO: 1382 - DNA, 212 bp, Homo sapiens
aatggtaatagaatagcacagccagacttgcttcctgcatggtagggagagacacaaaagatgggaaactgcttttccacaaggaatttccgtagaattttgcggcgaccagatggtgcataggtttggaaggtctgatctcccttggttttccatgggatggttagtgtggaggggagatatagattgtccggccgctttgtgattccatg

SEQ ID NO: 1383 - DNA, 257 bp, Homo sapiens
catgctaatgcgtggagtgtatgcgcagagtagctgtctgtttgactgcttcatccagggagggagaaggcttttcagcaccatctaatgttttaaaaggcactagttttaagtgtacagctcataaattctgctgacattttggattaaccttatgtaggttgccagctaatgaattgtaattgatttcaatcttagctgataaatctaattggtaatttatagaacaaatatttgataagctcctattaattgtc

SEQ ID NO: 1384 - DNA, 205 bp, Homo sapiens
gcatgtttaaaatgagactagccgggccaggtgtgatagctcacatctgtgatcccagtgctttgggaggccgaggcgggcagattgcttgagcttaggagttgaaaaccagcctggacaacataacgagaccctgtttttacaaaaatgagctgggtgtggcagtgtgctcctgtagtcccagccatttgtagggctgaggtgg

SEQ ID NO: 1385 - DNA, 223 bp, Homo sapiens
ataggttttataaaccacttgagcctatatcagtcgttttagtttttgacctaatatttggagctatcagtgctttgttgatttagatgatgactcaagattttttttggtccatttcccatttcctttttttccctgacccccataccctcacccttaaaattttcctgtaactcaactaacaaaatcaagcctgattcaaaacatcctagggtgttttaaa

SEQ ID NO: 1386 - DNA, 65 bp, Homo sapiens
tgaggtttaacctctatttcccctagccctgtccttccactaagcttggtagatgtaataataaa

SEQ ID NO: 1387 - DNA, 226 bp, Homo sapiens
atagtcaatgcgttcatcgtttcagcctaaaaataatagtctgtccctttagccagttttcatgtctgcacaagacctttcaataggcctttcaaatgataattcctccagaaaaccagtctaagggtgaggaccccaactctagcctcctcttgtcttgctgtcctctgtttctctctttctgctttaaattcaataaaagtgacactgagcaaataacctcatc

SEQ ID NO: 1388 - DNA, 269 bp, Homo sapiens
ttagagcccgaagagtcaaaaccctcaatgttccctcctgctctcctgccccatgtcaacaaatttcaggctaaggatgccccagacccagggctctaaccttgtatgcgggcaggcccagggagcaggcagcagtgttcttcccctcagagtgacttggggagggagaaataggaggagacgtccagctctgtcctctcttcctcactcctcccttcagtgtcctgaggaacaggactttctccacattgttttgtattgcaacattt

SEQ ID NO: 1389 - DNA, 139 bp, Homo sapiens
tgctctgtgagtccctccaattgttcttattccgagatttccattgttctgccccctcttgactcccagggctctcaagggagtgggggtagtgaagggagccctttcccaagctcccccaagagctctagtcacatca

SEQ ID NO: 1390 - DNA, 276 bp, Homo sapiens
agaagagatggtcacagcaagctgtcttgagtcattgtatgccagctccagtatcccactgcgcctcacccacagctaactggtgagatggtggtgcatgacccaaggaagtagctcaccttctgataaaatgaataatcctgtccttcagatgaagttcatcagtttcccatgcagaggattatctttaagcccagataggtgccctgatcacctccctgaactatttctttttttaatttccttttttttgagacaggatgtcgctctgcacgc

SEQ ID NO: 1391 - DNA, 140 bp, Homo sapiens
caaaacttagaagggcatggtggtacgtgcctgtaatcccagctccttgggaggctgaggcaggagaatcacttgaaccagggagacggaggttgcagtgacccgagattgcaccactgcacgccagccagggccatttc

SEQ ID NO: 1392 - DNA, 237 bp, Homo sapiens
ctttatctgtctttatgtcttggggttggggtaggtagataccaaatgaaacactttcaggaccttccttccttttgcagttgttctttaatttcctttactagaggagataaatattttgcatataatgaagaaatttttttagtatataacgcaggccttttattttttaaaatgatgatagtataaaaatgttaggataacagaatgattttagattttccagagaatattata

SEQ ID NO: 1393 - DNA, 135 bp, Homo sapiens
actttattacctcaatggcatagagtgtgcagcaagtgccatggagatgagtgccattgcagcccacaacgctgcactccttgcctatcaccgctggaacgggcacacagacatgattgatcaggatggcttata

SEQ ID NO: 1394 - DNA, 240 bp, Homo sapiens
taagcatttgcttggtaaggtttcttaagattaggtttataatacaaccatctgtaatgtatctctcgtttgagcttgtgggccatacaattcattaactagatgaatacattgtggacagcatcctcactacccctctctactcactcacaaagaaccatgatacactggaatgtttttctctggaatcctctttctactcttgtattaaaatttttccccacttcatgattatattca

SEQ ID NO: 1395 - DNA, 48 bp, Homo sapiens
acaaaaaccagtttaggctgggtatggtggctcaccagcactttggga

SEQ ID NO: 1396 - DNA, 111 bp, Homo sapiens
tccaaatgactatcagtggcaaaaaagaacaaaatctgagcagagatgattttgaaccagatattttgccattatcattgtttaataaaagtaatccctgctggtcatagg

SEQ ID NO: 1397 - DNA, 148 bp, Homo sapiens
tcatgaggtattacagtttgagcctggccacatcaagaggaggggtagagctaagaccatggctctagttgacatccagttggatcaccatgaacgatgtgattgtatctgcagctcaagaccacctcgataagagaatgtgcacatc

SEQ ID NO: 1398 - DNA, 169 bp, Homo sapiens
aagctggccgtacaaattacatttcaaaacaaaccctaataaatccacatttccgcatggctcattcacctggaataatgccttttattgaatatgttcttatagggcaaaacactttcataagtagagttttttatgttttttgtcatatcggtaacatgcagctttt

SEQ ID NO: 1399 - DNA, 174 bp, Homo sapiens
aaagatgaggctttcttacatatacatcttagttgattattaaaaaaggaaaaatatggtttccagagaaaaggccaatacctaagcattttttccatgagaagcactgcatacttacctatgtggactataataacctgtctccaaaaccatgccataataatataagtgctt

SEQ ID NO: 1400 - DNA, 277 bp, Homo sapiens; identical to SEQ ID NO: 148

SEQ ID NO: 1401 - DNA, 36 bp, Homo sapiens
actgcacttcagcctagttgacaagagcaagactct

SEQ ID NO: 1402 - DNA, 277 bp, Homo sapiens; identical to SEQ ID NO: 148

SEQ ID NO: 1403 - DNA, 230 bp, Homo sapiens
cagtgtaatggaggacgggcaacgtgcatgtgcaggctcaccactcccaggcctttgacatgagggacatgtgacagtgtcattcagtattatgttcaaaagacatttttatcctgatcataattaatttgaaaactctttaagttcatgttatacaagatgatttactgtattatacttttccttttttatataatgtttaacaaaaaatacagctgcaacattttgat

SEQ ID NO: 1404 - DNA, 117 bp, Homo sapiens
ttcatcactatcatcaccttcactgcttgtttatcatcatctttgtcattttcatctttttcttcctcattatctttccatcatctttagcaacaactttgtcaacacagccagact

SEQ ID NO: 1405 - DNA, 33 bp, Homo sapiens
ctttccatcatctttagcaacaactttgtcaac

SEQ ID NO: 1406 - DNA, 208 bp, Homo sapiens
aatgatgtgatggtaccgtataatcctgtaattgggaaatttcacatttttcctgtcctaatctcagaggtgggagaagcaagtctagaacatctccaggctcagactaaacgagagtacttggactgcaaccaagtaatcactgcaaagtagttccaagcagcaagaaataccagattctcatggaggctactatagggtacagaat

SEQ ID NO: 1407 - DNA, 172 bp, Homo sapiens
tttttcctgtcctaatctcagaggtgggagaagcaagtctagaacatctccaggctcagactaaacgagagtacttggactgcaaccaagtaatcactgcaaagtagttccaagcagcaagaaataccagattctcatggaggctactatagggtacagaataacaacatga

SEQ ID NO: 1408 - DNA, 138 bp, Homo sapiens
ccactgttcccctccaatttatgttattttttaccctgtttttcagttccatttttgctctgtcctatagctttataaaaccagagtgtgtggggctgaggtcaggagtataagtacctgccttaggcactattcctt

SEQ ID NO: 1409 - DNA, 232 bp, Homo sapiens
  misc_feature (152)..(152): n is a, c, g, or t
tagaaaattttgctatatggtctttcttgaagattatttgtaattttgtataattgatttagaaattcccatcaaattttaaaattcagagttctagataaaaccatcaattatctgaaatcctttctcagtcaagactgcccatgaagccnaagtgccttatttgatcctataagcttcactgaaaatcagcagagtctttattaatttataaatgatgggcatgattaac

SEQ ID NO: 1410 - DNA, 215 bp, Homo sapiens
aactgccgggcagcaaagcttctaagtgaaacctgtagtagcagtagtagtagggagaaaatgtgtagtcatcaagtgaaaataggaaaggatctatgatttatgatgtcttaatagaccctaaattgttctttaattacaagagtggcagtctctgaagtcatttgtgagcttgtatgacttttgtatttagcaatgttgcatgctcacataat

SEQ ID NO: 1411 - DNA, 262 bp, Homo sapiens
aaaagtaaagccctggtgttgtgttttcatgtcttttttcagccctctcagatccaaatgttattatgcactttttaatgtttgtaaacttttactaataattagtgtgaattgcattctgatacaataatgattatcattagaagctaacaaaattctcattaatactgtgtttgatggcctctgctgtgttttaacatcgtgcttcttatatggaaagtttttgtgagctgtgtaatccctctggtcagtattatgaaat

SEQ ID NO: 1412 - DNA, 208 bp, Homo sapiens
gtacaggcagttaggtgctgaatgaagctgccatccttgctgcagcttctaactggtaaaaagatccagggatggagatgggaaggttagaaaggcagccctcacctctgaggacagaggccggggtccaggcccgtgggcgcaaaggtgcctcatagcatagccagcattcagcacacacaaacctactgcccacatttgggctcag

SEQ ID NO: 1413 - DNA, 83 bp, Homo sapiens
agctgggcagggtgagaagctagatgcccctgcagtttggccctggagccagggcagaggaatgtagggcctgcatggagaag

SEQ ID NO: 1414 - DNA, 227 bp, Homo sapiens
atactgattctttcatgcaatgatgtgtattttcccattttggaggctgtgggagatgacaagacaatgaatgggaaggtttgacacagaacaaatcagcggttttgaaagcttggggaatttcagactcctttgagaattattggaaaatggacccactataacttggcgtgtgtgtgaactgcttgatgcccatccaggaaagccaagttaagaagctttgcttc

SEQ ID NO: 1415 - DNA, 228 bp, Homo sapiens
gaatctatgggccttcacagggcccagggggctcctgatgcccccttccacatgtgagccaggacatgaggcttccctgaagcaaggatttcagccagatgccatagaccctcagaacttgacctggaagtccagacactgaacgcaggcctcaaaactgctgcggccttccaactcctggtatctgcatcggcgaatggcccttcttgccttgatccacagggatgg

SEQ ID NO: 1416 - DNA, 203 bp, Homo sapiens
gcctgagagacgagcaaaactgtttcaaaaaaataaaatgaaatacataaataaatgtgcctttcctgtgccgggtgctgttcttgccagtggggatacatgagagaacactgccttgcccgcatgaggcttgtggcctggtactgtgcacacctcaggggattctgataattagctgagcacagttgccagcacagggcctg

SEQ ID NO: 1417 - DNA, 32 bp, Homo sapiens
atggacccactataacttggcgtgtgtgtgaa

SEQ ID NO: 1418 - DNA, 109 bp, Homo sapiens
tgtgcctttcctgtgccgggtgctgttcttgccagtggggatacatgagagaacactgccttgcccgcatgaggcttgtggcctggtactgtgcacacctcaggggatt

SEQ ID NO: 1419 - DNA, 222 bp, Homo sapiens
  misc_feature (56)..(56): n is a, c, g, or t
  misc_feature (64)..(64): n is a, c, g, or t
  misc_feature (80)..(80): n is a, c, g, or t
  misc_feature (84)..(84): n is a, c, g, or t
ggactctccggggtcttagtactatgatacttcagagacaattccatgctgatacnggggagancaattttggggctctnggantaagtctgtcccacatctgtctgatttcccttggcatccttcccgtcagttcctcttgaatatcccagttcttgtacccactcacatacctcagatcccttcactcctccccgcagtttgcagcatgggtcacagtga

SEQ ID NO: 1420 - DNA, 177 bp, Homo sapiens
agatgagatggtggtttatggctccagagctgctgctcgcttcgtcagcacaccccgaatattgaagagggggccaaaaaacaaccacatggattttttataggaacaacaacctaatctcatcctgttttgatgcaagggttctcttctgtgtcttgtaaccatgaaacagcagaa

SEQ ID NO: 1421 - DNA, 228 bp, Homo sapiens
aaggatttggagtggcattccgaagatcaccacacataccttggttttgatggctgctgaactccgactttttcgctgagacatgactgtgggaacagcctccagctatctgctcatcagaggtgctttcctcaacctcctgcaccacctccaagagaaacagcctaaaaagaaaccccagctgtttacttatattggtctgtaaatccctggaagtaaaccccatgc

SEQ ID NO: 1422 - DNA, 191 bp, Homo sapiens
aatgaggaggtttggctattgtcacatgacagactgttagccaaggacaaagaagttctgcaaacctcccctggacccttgctggtgtccagatgtctgcggttgtcagccccttcctttcccccgacctaaacataaaagacaaggcaaagcccgcataattttaagacggttctttaggacattagtcc

SEQ ID NO: 1423 - DNA, 198 bp, Homo sapiens
accacacacacatcgcgcccctagagagcgcagccatttggagcaaagagaaggataaacagaaaggacaccctttttagggtccccaggggggccgggctggggctgcgtaggtgaaaaggcagaacactccgcgctttttagaagaggagtgagaggaaggcggggggcgcagcaacgcatcgtgtggccctcccc

SEQ ID NO: 1424 - DNA, 249 bp, Homo sapiens
tgattccaatgctttcacgttggttcctggcgtgggaactgctctcctttgcagccccatttcccaagctctgttcaagttaaacttatgtaagctttccgtggcatgcggggcgcgcacccacgtccccgctgcgtaagactctgtatttggatgccaatccacaggcctgaagaaactgcttgttgtgtatcagtaatcattagtggcaatgatgacattctgaaaagctgcaatacttatacaata

SEQ ID NO: 1425 - DNA, 282 bp, Homo sapiens
ggatggcacacatcagctttcaggaaaagcacatgaaaggtgctagggctcttggagctgactgtaggtttgggagttgtctgtctccttgctctagattacagctctgtgtgttgtgtggggtctccatggtttgccaaattatctcttcctcacttagccacaaggctgacagttaggaactatctcttcttgattgcattaggttggctgcttcctgaatgcatatcaaaaggctccttcctttagttcagtgctttcaacctgagctgtgcatcagaa

SEQ ID NO: 1426 - DNA, 203 bp, Homo sapiens
aaatcataaagccttcatcactcccacatttttcttacggtcggagcatcagaacaagcgtctagactccttgggaccgtgagttcctagagcttggctgggtttaggctgttctgtgcctccaaggactgtctggcaatgacttgtattggccaccaactgtagatgtatatatggtgcccttctgatgctaagactccaga

SEQ ID NO: 1427 - DNA, 245 bp, Homo sapiens
tgggcttccctctacagtgtggaactcaggttgtttcttctttcctccctgaaatgacatgagtttgcagcggatggtgaactgaagaaaccataggaggctctgtcttcttgcctgaatttcagttggaagcttggagatttggggttcaacagagataaggaagtgtaagccttcatcccgtctggtggttggcgatcacacaccgctctgtgctgaggctaatggccatgatcagagttgac

SEQ ID NO: 1428 - DNA, 191 bp, Homo sapiens
agttccatggaggtgcccgctggacactggaggggatcctgagtgggctgatctccacattcccacctggccacaggctgcttcacccagaaaacagttctctcctccttagatgtcagaattctctgtaagatttttctggtaagaaaatgattctgccacttaaaaaaacaagtttgaaggctgggtgt

SEQ ID NO: 1429 - DNA, 200 bp, Homo sapiens
aaagctttaaatttgtagaactcatttaactaaagtaaattttgctgtgactaatccaatatactcagaatgttatccatttaaagcatttttcatatttcaactaagataacttttagcacatgcttaaatatcaaagcagttgtcatttggaagtcacttgtgaatagatgtgcaaggggagcacatattggatgtat

SEQ ID NO: 1430 - DNA, 239 bp, Homo sapiens
agaggaggccgtgctgcctgctcatgtgaggctgttgctcagcatgcaggggccctgtcgcgggcacagcccaaggctgcctccccacggtgcgtgccctggtgctgcgggtgcagcacggaaaccccggcttctactgtacaggacactggcccctctcaggtcagaagacatgcctggagggatgtctggctgcaaagactatttttatcctgcaactcttgataaagggctgtttt

SEQ ID NO: 1431 - DNA, 228 bp, Homo sapiens
tgcctgctcatgtgaggctgttgctcagcatgcaggggccctgtcgcgggcacagcccaaggctgcctccccacggtgcgtgccctggtgctgcgggtgcagcacggaaaccccggcttttactgtacaggacactggcccctttcaggtcagaagacatgcctggagggatgtctggctgcaaagactatttttatcctgcaacttttgataaagggctgttttgcc

SEQ ID NO: 1432 - DNA, 216 bp, Homo sapiens
  misc_feature (169)..(169): n is a, c, g, or t
caagcacagagtgccttctgaggtgaggcctgtggccagcccagcaaccacacttagtgtgtcgggcaggactagggccatagcaggtacataggcagggttgtgccccagccgaagctgtctgcctgcctgtctgtccccataggcctcaagccaggcaccaggtggngggcttttattgcagcctaggatggcagaggcattgtgggagcccat

SEQ ID NO: 1433 - DNA, 216 bp, Homo sapiens; identical to SEQ ID NO: 1432
  misc_feature (169)..(169): n is a, c, g, or t

SEQ ID NO: 1434 - DNA, 262 bp, Homo sapiens
agtcttgttgacgagtttttagagactgctggacctctgagggctttgagagtgcagctgtgatgatgtttcactattacttcagtgtgaatgtagaaccaaggactcatcttcattttatacctaaaagtgccttgtcaagaaatttttgcatgttttaaaagataaatatttttgtacacagagttcaaggggaaatgcactttaaaaatcccaagaatggatgttctttgtgtggtatgagaggttggtttgtatctca

SEQ ID NO: 1435 - DNA, 230 bp, Homo sapiens
ttacttggagacttcactgcaccttgacttgtagatttgccttcagacagcttttggttatggttacaagtggcccccgagtcccagaatctttcccaggttgccccagaaagaccagccacctgtcacaggtgcagttgtccggcaatagggaagcaacttcatttttgttttatatttattccctcaagtgccctgaggagcatttgcaaactgggtacaataaataa

SEQ ID NO: 1436 - DNA, 130 bp, Homo sapiens
atttatggtgtgtatgtaaagagataggggagaaaaacctcacccaagttcttatacgttattttaaacgtttgccaactctgaaatttcagagattcattgttcttaaccatattggactaaagtctgt

SEQ ID NO: 1437 - DNA, 224 bp, Homo sapiens
acctggcatttatctggccaaaaacaggagccagagaaatatgaatataccaaagttgtttgtttagcctccaacttaaattacattagtcaacttatagatactcatatgatcacttttctttttagatactacatcaactagattcaggagtatatcatttgcagtgcttgtattggtttaaaatgtaagattttaagatcctctaacactgtactaaaaca

SEQ ID NO: 1438 - DNA, 196 bp, Homo sapiens
cacaattgaaaagaaacactggctgggcacagtggctcatgtccgtaatcccagcactttgggaagctgaggtgggcggatcacctgaggtcaggagttcaagaccagcctggccaacatggagaaaccctgtctctactaaaaatacaaaattagccgggagtggtggtgcatgcctatcaccccagctactcag

SEQ ID NO: 1439 - DNA, 92 bp, Homo sapiens
caacaaacattgagctagccacagtgcagcctggccagaatttccacatgttcacaaaggaagaacttgaagaggttatcaaggacatttaa

SEQ ID NO: 1440 - DNA, 143 bp, Homo sapiens
ggaatcctgatcctcagaacttctctgggacaatttcagttctaataatgtccttaaattttatttccagctcctgttccttggaaaatctccattgtatgtgcattttttaaatgatgtctgtacataaaggcagttctgaa

SEQ ID NO: 1441 - DNA, 273 bp, Homo sapiens
taaaaagtaataattaggcccaggcacagtggttcatgcctgtagtcccagcattttgggaggccgaggcgggtggatcacgaggtcgggagttcgagaccagcctggccaatatggtgaaaccccatctctactaaagatacagaaattagctgggcgtggtggcatgcgcctgtagtcttagctgctggggaggctgaggcaggataactgcttgaacccaggaggcggaggttgcagtgagctgagatcgcacccgcctgagcgacagag

SEQ ID NO: 1442 - DNA, 190 bp, Homo sapiens
aatggttctccacttaaaaaatattttctggctggacatgtggctcacacctgtaatcccagcactttggtaagccaagatgggtggatcacttgaggccaggagttcaagaccagccaggccaatatggtgaaacccctgtctctaataaaaatacaagaaattagctaagcacggtgacatgtgcctg

SEQ ID NO: 1443 - DNA, 157 bp, Homo sapiens
cgactgctcccatcaggaataggagagtagacagagattttccacatcccaggcttttgctgctgctttaaaagctctgtccttggagcctcccgctccctgaagtgtctcgccccctgcacagcactggcctttcggaagcatcccagtagggttt

SEQ ID NO: 1444 - DNA, 124 bp, Homo sapiens
gcagaattttccgtagacaaagaaaggatcttgtgtatttttgtccatatccaatgttatatgaactaattgtattgttttatactgtgaccacaaatattatgcaatgcaccatttgtttttt

SEQ ID NO: 1445 - DNA, 264 bp, Homo sapiens
atacaaccgattcctgaaccctgacggatcagagaagaaagacttttacaaggatgggaaacggctgaagaattacaacatgccctggggggcggggcacaatcactgcctggggaggagttatgcggtcaacagcatcaaacaatttgtgttccttgtgctggtgcacttggacttggagctgatcaacgcagatgtggagatccctgagtttgacctcagcaggtacggcttcggtctgatgcagccggaacacgacgtgcc

SEQ ID NO: 1446 - DNA, 170 bp, Homo sapiens
cccttttctatttaagatcttttggagaaagcattttagaagaaaatgaatctccggtctcaggttttgtctgatctctcatgtctaggatggtttatttctagacgaataggtcccacattgttaggaaagctcagttttagtaggttgtgaagtctcacatcacacaa

SEQ ID NO: 1447 - DNA, 145 bp, Homo sapiens
cccttttctatttaagatcttttggagaaagcattttagaagaaaatgaatctccggtctcaggttttgtctgatctctcatgtctaggatggtttatttctagacgaataggtcccacattgttaggaaagctcagttttagta

SEQ ID NO: 1448 - DNA, 259 bp, Homo sapiens
attgaaagctctatggattatccactgcaaagttttctttccaaaatcaggctttgtctgctcccaattcacctcgttactctcacctcgtgatatccacaaatgctattcagataaggcagaactaggagtcttcactgctctgcccccaactcccggaggtgtcaccttcctagttcttatgagctagcatggcccgggccttatccagtcaaagcggatgctggccacagaaaggccactcaggatgtcctttgtg

SEQ ID NO: 1449 - DNA, 259 bp, Homo sapiens
ggaggagctgctccttccttacagccttggggatggacttgcccacacctccacctcccctgagccctgtgagaggcacgactgtttatgccaatgaggctcggtggggggctctcaagtgcctgatcctgccctgggctcagagccagcccagagggaagcaactgcacagccccacaggccctccctggcactgtccccccaaccccatttcagagctcagagggtacaagctccagaacagtaaccaagtgggaaa

SEQ ID NO: 1450 - DNA, 210 bp, Homo sapiens
  misc_feature (167)..(167): n is a, c, g, or t
gggcagcccatttctcaaagtccagaaaattagggtcccagaagggggcagcagcaggctgggagttaggagggagagcagggtgccggccctgccaccaagttgagagctggaggggaggtggggagagaacatcacagagcagccagccctggttcactcctggnagtttcttctcaagctccttccctaggagcatgggtggcacgt

SEQ ID NO: 1451 - DNA, 130 bp, Homo sapiens
gggacaaggtcccttggtgctgatggcctgaaggggcctgagctgtgggcagatgcagttttctgtgggcttggggaacctctcacgttgctgtgtcctggtgagcagcccgaccaataaacctgctttt

SEQ ID NO: 1452 - DNA, 265 bp, Homo sapiens
ttctgaaatagcttgaggccaggagcagtggcttatgcctgtaatcccagcactttgggaggccaaggcgggtggatcatttgaggtcaggggttcgagaccaatctgaccaacatggtgaaaccccgagtttactaaaaatacaaaaaaattagccaggtgtggtggcgcatgcctgcagtcccagctactcaggaggctgaggcaggagaattgcttgaacctgggaggcagaggttgcagtcagcagagatcgtgtcactgc

SEQ ID NO: 1453 - DNA, 47 bp, Homo sapiens
ccagcctggcaaacaccccatctctactaagcgaaaacccatctcta

SEQ ID NO: 1454 - DNA, 81 bp, Homo sapiens
aaataaataaaatagtccaggcgcagtggttcccgcctgtaatcccagcactttgggagaccgagacaagaggatcgcttg

SEQ ID NO: 1455 - DNA, 241 bp, Homo sapiens
gaggccccctactagaaggacgtgaaagcagcttttgggggaaactgaggcagtggggaagacagagcagaatgagccctcaccctggctgggggtccagcacaggctgtatctgcagagggtcccagaggaacgctggagccaagagaagccctgggaaggaggggtggggaacgacatgcatgtgagggatggcacactgatgtgtttatgcacctgtacacaggagcgcatggccatg

SEQ ID NO: 1456 - DNA, 240 bp, Homo sapiens
tgagactcataaggccatccaggccctcaatggccgctggtttgctggccgcaaggtggtggctgaagtgtacgaccaggagcgttttgataacagtgacctctctgcgtgacagtggtccctctccccggacttgcacttgttccttgtttcctctgggttttatagtgatacagtggtgtccccggggccaggcgcgctctgcccagcccagcctacagtgcggataaaggtgcggat

SEQ ID NO: 1457 - DNA, 221 bp, Homo sapiens
caggccctcaatggccgctggtttgctggccgcaaggtggtggctgaagtgtacgaccaggagcgttttgataacagtgacctctctgcgtgacagtggtccctctccccggacttgcacttgttccttgtttcctctgggttttatagtgatacagtggtgtccccggggccaggcgcgctctgcccagcccagcctacagtgcggataaaggtgcggat

SEQ ID NO: 1458 - DNA, 283 bp, Homo sapiens
  misc_feature (118)..(118): n is a, c, g, or t
  misc_feature (133)..(133): n is a, c, g, or t
  misc_feature (138)..(138): n is a, c, g, or t
acccaacccctatgttagttcatctcgagccacatttttattgccataatccaggcctggacaggccaagatcttttaacaattttaattactgaaaataataactgcattttttttnaaagcccaacttttnggtanagtcagcccaaaatacagtctttgtgttgccatctgggaactggatttggaattgttcttccatgagactgcagagcagaacggcagggccagaggtcccacgagctggtcagacccggttctgctccttgctggctgagtgacc

SEQ ID NO: 1459 - DNA, 179 bp, Homo sapiens
ccagaagcaattcagcccaacaggaggacagcttcaacccattacgatttcatttttgccccaaccactcagcagcaagcacctgttacctgtccacccccaccccttcccccaaactgcctttgaaaaatccctaacctatgagctttgaataagatgagtacgaacttcatcgccca

SEQ ID NO: 1460 - DNA, 158 bp, Homo sapiens
gtttccggtagctcactgactttgccctctttgctggtaagccattgctgatttccatcagggtaacaagcatgattttcagatttaccttcatttgcagtgaacaattatagcaaaattgcttaaagaaatgaaccttcaggtgtggcggctcgtgc

SEQ ID NO: 1461 - DNA, 92 bp, Homo sapiens
tgagcccaggaggtctttaggctgctgtaagctgtagttgcccccctgccctccagcctgggtgacagggtgagacatcgtctcaaaagaaa

SEQ ID NO: 1462 - DNA, 249 bp, Homo sapiens
aatgggggcatacccattatgggatgcagggcatcctgcatcctgaggaattttttttcctccaaaaatgaaaccttgaaatgaggacattgtcctgtccacggactgcacaacaacactgagcctcaaggactcatactggcatttttcttcttttgcagagtgtgggcaccctggcttcaagctcacgagaaaccaggtcgggatttaaacaatgttgggttaaagcaaagtttcataaagacagaa

SEQ ID NO: 1463 - DNA, 33 bp, Homo sapiens
aataccctgtcctttgtacctgcgtgaagagag

SEQ ID NO: 1464 - DNA, 242 bp, Homo sapiens
gggactgccagatgaataggcttgaggcagcatacgagtttgctatacacttgctcaaaacattagtggactcaaaaccaaaaagacaacccagtttcagaatgggcagaagacttgaacacacatttctccagagaagttatataaatggccaataaacacatgaaaagatgctcagtagccatggttgttagggagatgcaaattaaaaccatgagataccccttcatacctactaggat

SEQ ID NO: 1465 - DNA, 137 bp, Homo sapiens
tttttaattagccagtggcatgcacctgtggtcccaggaggccaaagctggaggattgcttgaggatgggaagttgaggctgcagtgacctatgttcccaccactgtactccagccagagtcacagaacaagacctt

SEQ ID NO: 1466 - DNA, 144 bp, Homo sapiens
tgtcagctgcatggagcttcgttcaagtattttctgagcctgatggatttacagtgatcttcagtggtctggggaataacgctggtggaaccatgcactggaatgacacacgcccggcacatttcaggatactaaaagtggttt

SEQ ID NO: 1467 - DNA, 280 bp, Homo sapiens
  misc_feature (102)..(124): n is a, c, g, or t
  misc_feature (127)..(128): n is a, c, g, or t
  misc_feature (130)..(133): n is a, c, g, or t
actttattctgtaaccttttcaactaccattttgaaatttgcttttatccatgtggttgtttgtgatgaactacaggttgctgactttcttccccttctgtnnnnnnnnnnnnnnnnnnnnnnngtnntnnnnctcaagaggatctcatcagtggaatcattagatcaaaggatatgactgttgctcagctctctgtgtgtatgtaaattaataggctgtttatttgagcagttgtaggcttacaaaaatattgagtcaaaagtatagaattcccatata

SEQ ID NO: 1468 - DNA, 258 bp, Homo sapiens
agcttcccggaaagacctcagctgtctagctggtctgggctgcccagttcttagcagtgcatcagcaatgagcagccgctgaccatcaggcagcgtttcccgcctgccagagaacgtcagagccactgcgtctggaccagctgaaggcagccacggtgcccaggatgctgctgctgcctccaaggaaaagaactctgaaaatgaggaattacagcctggtggttttgttttatgttaattttttacatctgggagata

SEQ ID NO: 1469 - DNA, 153 bp, Homo sapiens
gtttccggtagctcactgactttgccctctttgctggtaagccattgctgatttccatcagggtaacaagcatgattttcagatttaccttcatttgcagtgaacaattatagcaaaattgcttaaagaaatgaaccttcaggtgtggcggct

SEQ ID NO: 1470 - DNA, 51 bp, Homo sapiens
ttttttattcaaagggcttgtgctcaaataaagtgagagtaggtagagaga

SEQ ID NO: 1471 - DNA, 283 bp, Homo sapiens
cttttcagtagtggctgggactgccagatgaataggcttgaggcagcatacgagtttgctatacacttgctcaaaacattagtggactcaaaaccaaaaagacaacccagtttcagaatgggcagaagacttgaacacacatttctccagagaagttatataaatggccaataaacacatgaaaagatgctcagtagccatggttgttagggagatgcaaattaaaaccatgagataccccttcatacctactaggatggctgtaattaaacaccaccaccac

SEQ ID NO: 1472 - DNA, 201 bp, Homo sapiens
gacttcgcaggtgagcagtaacggaaatcagccccgtttattcctcccagcacctgccttatccaactccccacgctgtggctgagtcccagcctgctatggaagcatcactggactcccattgaactctgtgcagattcgctgttcgtagacatggtacctgatggacaccaagctacgtacagcttcaaggccccttct

SEQ ID NO: 1473 - DNA, 204 bp, Homo sapiens
tgagactaatattagtaccccccttttaaagtgattatgagcattaaatgaattagtacgtttaaaggcttagaacagtgttttatgatatgataaacactcaataaatgttagctattgatattggtgtgcccagaaggcttgttactactagttgatttatgtgcttgccaaaagttgttgtgttggtaattaagtacgaca

SEQ ID NO: 1474 - DNA, 266 bp, Homo sapiens
gcaagccagccgccggtgctgttgacccaagggccgtggtccacggtacttgaagaagccagagcccacatcctgtgcactgctgaaggaccctacgctcggtggcctggcacctcactttgagaagagtgagcacactggctttgcatcctggaagacctgcagggggcggggcaggaaatgtacctgaaaaggattttagaaaaccctgggaaaacccaccacaccaccacaaaatggcctttagtgtatgaaatgcacatgga

SEQ ID NO: 1475 - DNA, 133 bp, Homo sapiens
gatgggccttcagggaagttcctggcaggaacagtccttccatttgtttgggcggatggtccggaagagcaaagccatgctaatgagacagaggaatagcaagtccccttcaagccgacaggaaggggcctca

SEQ ID NO: 1476 - DNA, 287 bp, Homo sapiens
gattggattaaagacctggcacttcagtaactcagcacgcttccacttcactcaacttaagagagttcattgacagtgttaggatgtgaaggctgggaaacacttattttgcttcaagagttccacttggctctcccaaataggtacctcaaaaactgttagcaagcggcatttggatgtcttgacaggggctttgcagggatttttagggttttttccacattgtccacattaatggttggcatgattgtgcttgcaggccaagaaatgatcataccccttgccaa

SEQ ID NO: 1477 - DNA, 243 bp, Homo sapiens
acatcattgttgaaaccagaccctgtagtccagtggtgctgccctgttgtgcaaactgctcctttttctcgtgtttttgtaaagagcttccatctgggctggacccagttcttgcacatacaagacaccgctgcagtcagctaggacctttccgccatgtattctattctgtagtaaagcatttccatcaacaatgcctaattgtatctgttatttttggtttaacacacactgattcatact

SEQ ID NO: 1478 - DNA, 284 bp, Homo sapiens
ttcgcatttaaggtataggttgttttaggcatgggcagtaggcgctttcagcacaggctccctgctggtcactctttgctgtagtttcctgctccatccatggggtcggaggtcttacctcctgacgttagagtcatttgcagcaggtgggagtgaaagtgggccgggtgccaggtcttccttacctgaacctctcctgtcttcctggcacattaggaatgtccaagcttatttctattggtgaatgctcccacatgggatggataatggcctgtggaacattc

SEQ ID NO: 1479 - DNA, 272 bp, Homo sapiens
cggtggctcactcctagaatgccagcactttgggaggttgaggtgggcagatcacttgagctcaggagttcgagaccagcctggccaacatggtgaaaccctgtttctactgaaaatacaaaaatgagccgggcatggtggtgcgtgcctataattagcagctactcaggaggttgaggcaggaggatcgcttgagcacaggagatggaggtagcagtgagctgaaatcatgccactgcactccagcctgactgagtgactgagtgagactt

SEQ ID NO: 1480 - DNA, 107 bp, Homo sapiens
tctgtctgtgtgtctattagagtcttgctgtgtcacccaggctggagtgcagttgcgtaatcgtagctcaccgtaacattgaactgggctcgagcttcccagagtgc

SEQ ID NO: 1481 - DNA, 207 bp, Homo sapiens
tgacaaaatgacatgtaaactgacttttcccgtattagtattccaaagatgcttaaaagtggcttgtggcatttatgagaaagtctttgtgtcacatttcaggaaaggactttgatttctctttgttatttaatcactgatgtggtctaaacccacgataatatgtatctttccttttaaactggattttatgttgtctcattaaaa

SEQ ID NO: 1482 - DNA, 189 bp, Homo sapiens
gtttgtcgaagaataactatcacagaatgtggacagatataaaatcattgttgttcatagaaaatttcatctgtataagcagttggattgaagcttagctattacaatttgatagttatgttcagcttttgaaaatggacgtttccgatttacaaatgtaaaattgcagcttatagctgttgtcacttt

SEQ ID NO: 1483 - DNA, 244 bp, Homo sapiens
ctgtgccctttcatagatattcgattaatttttacattttaaacaagttgactatttcctttaggggttttgtttcaaacttttctgtcatctgtctctactacctcagaaactgcagcttggttctgatgatagaaattgaatttttccttgtagttattgtgataaagtatgaatatttttagaagtctataccatgttctttcgttaaagatttgctttatacaagattgttgcagtacct

SEQ ID NO: 1484 - DNA, 196 bp, Homo sapiens
tgattttggtgtgacttgtgtaaatggttcatggcaatgacgttgggttgcttcctaggcctggctgagttgtgcctaagggtggctgaaatactaaaacacttatcttacagcaagtgaacaggggctacctgccacatcccctccacagatgcactttaaaaagccactcatgctttggcttaaactgtaatta

SEQ ID NO: 1485 - DNA, 54 bp, Homo sapiens
tcactctctcatgttgtatgtgttagcttttgctgaaatataaaccatcccaaa

SEQ ID NO: 1486 - DNA, 287 bp, Homo sapiens
ccctttatctcttttcatgctaagcatttattttcagccattctctgctttgcctggcttccaaacttttcaacgtgaccattcctattttattaatggactctagttaccaacttgtcagtttattatatgtgttgtaaaaaagtgcaggggctatttaaaattgtagaacagagatctactgtgctgattctgaaatatttaaaagcgttctcttggtgtctaccaggccatgatatctaggaggacccaacgagtgacaatagggtttcagacgtgattgttag

SEQ ID NO: 1487 - DNA, 200 bp, Homo sapiens
tgcaagggacctacattcctcagtacacgcctgtgcctccgacagctgtttctattgaaggtgttgttgctgatacctctccccagacagtggcaccttcatcccaggacaccagtggtcagcagcaacagatagcagtggacacatccaacgaacatgcacctgcatattcttaccaacagtctaagtaagtctgggct

SEQ ID NO: 1488 - DNA, 174 bp, Homo sapiens
aaaaaaaaaagtactgctgggcgcggtggctcacgcctataatcccagcactttgggaggctgaggagggtggatcatgaggtcaggactttgagaccagcctggccaacatggtgaaaccctgtctctactaaaaatacaaagattagctgggcacggttgtaggcacctgta

SEQ ID NO: 1489 - DNA, 293 bp, Homo sapiens
ggaaatgtccgcagaaaagaagtcactccctctcagggccttcagataagacttcatcaggtgtactaccagactgccattacagttcccaaaggtgattcatttccagtgggatttgtagagtaaatctcagttaagcaatcacaaaagagactaagtgtcccagaggatgtcaagtagcttgaaaggcataatgtaaaaatattatatctaccatggcagaaaaccagattgagaccagaggaaaggacttcacttataaatcaatgaccttgacagtagttgtcttcgaa

SEQ ID NO: 1490 - DNA, 72 bp, Homo sapiens
gggagattggtggcccttgccaggaagtgtcttaacactttgtggatactgctgcctgttgtctttaaaagc

SEQ ID NO: 1491 - DNA, 130 bp, Homo sapiens
ggtatgttccttcccaggcatagaatttcgccattgctccctttccagccaatcccagttttgtcagcaacgattactcatggtccttcggttacaaaaaatacagggccacttgtcaagatatcagaat

SEQ ID NO: 1492 - DNA, 259 bp, Homo sapiens
ttagcaccaccttagctgtatcccagaggttttgataggttgggtcattattgtctttcagttcaagaattttttaatttccatcttgattttgtttttgacccatagctcattcaggagcaggttatttaatttccaaaccctaagtgttcccccagaaaactgctagaactgattatataattcagcaaagtttcaagatactggatgaatgtacacagatcagtagctcttctatgcatctacagtgaccaagcag

SEQ ID NO: 1493 - DNA, 277 bp, Homo sapiens
ttatctgcagtcttttttatgagctttacaaagtttttagtcagctttgcttgtcacattgcaaaacctagcttaagagcattaaaaaaaaaaacttaagtagataggagcttatggtcaaaaagtgcaaaaaaaaaaaacaaaaaaaaagcaatagatagagaaattgttgacaatttctgtagtctttcctagttgtgatcaaattcagcctatggatggcctattttataccaaagatgaagtgacaccctattacagtccagaagatagaggt

SEQ ID NO: 1494 - DNA, 285 bp, Homo sapiens
acaatgcatcagagaggcacaaggttagaaagagcacagcaatgacagaaaggctttaagagggcagatgagaaaaagttaatagtggtttaattttggggtagggagtggttttgtaagtttcatttttaaggcataaccatgaatgaaaacaatgatagatttttaattttttattgttttaataaaatgcctacattttgactaaaataatatgattggccctccacatctgtgggctccaccaagcgtgatttttaccaactgcgggttccatcaagtggg

SEQ ID NO: 1495 - DNA, 266 bp, Homo sapiens
caaggttagaaagagcacagcaatgacagaaaggctttaagagggcagatgagaaaaagttaatagtggtttaattttggggtagggagtggttttgtaagtttcatttttaaggcataaccatgaatgaaaacaatgatagatttttaattttttattgttttaataaaatgcctacattttgactaaaataatatgattggccctccacatctgtgggctccaccaagcgtgatttttaccaactgcgggttccatcaagtggg

SEQ ID NO: 1496 - DNA, 233 bp, Homo sapiens
gttcttatgtatgggccaattctgcttatatggacacagtgcaaacaggtacgacaagatattttcttcctcaaggatgatacctagcagataaagactgatttctaattcagtattgttacaactgcaggtgtgtgacccgtagcgagccactaaaccattctgaatctcacttccttcactggtaaaatagggaaaaatattagttgcctcatagagttgtagtaaagatt

SEQ ID NO: 1497 - DNA, 38 bp, Homo sapiens
agaacagtattcctgaacctattgatcctctgtttaaa

SEQ ID NO: 1498 - DNA, 51 bp, Homo sapiens
cacctgggtccacatgcagctggcaggtgtttgctagtgtgcccacccatg

SEQ ID NO: 1499 - DNA, 52 bp, Homo sapiens
gcaactactggcccttcagtatattatagtcagtcaccagcatataattccc

SEQ ID NO: 1500 - DNA, 52 bp, Homo sapiens
tactatggtgccaaaaatagttgaacatcgacatcaaaaagattctttctgt

SEQ ID NO: 1501 - DNA, 85 bp, Homo sapiens
ttcctcttgttttgccatttttttactccctcacatgtgcttttgccctttttaaaaatatttttcgtctgtaatccgagcattt

SEQ ID NO: 1502 - DNA, 255 bp, Homo sapiens
caaggtgggtaaaaggagagtctcagaacttctgacttctaacttaaactaaacagcctggtggttgagaagttgtctgtatgtgtaacttttcaattttgctcatttgaattgggtctgtcatatgagtaggccgtgactagatttgaaaagctgactttttaacatcttgaggcaaatgtagtacatttatataattttaacgttcagcaaaatacaataagtgcttagcttgatcttctagctctttgaaaa

SEQ ID NO: 1503 - DNA, 226 bp, Homo sapiens
  misc_feature (83)..(83): n is a, c, g, or t
  misc_feature (107)..(107): n is a, c, g, or t
ggtgagttttaaagtataagcatttttaaagaacattaccttaattttttaaaatcatgaactttttattgaaagtttttttnttctgaaaacagcagcttggtcanattatgacagatgtgttttttattgctgcaaaatagttaatgtagttaaatataagcacttagaggagcaatgcctggcacacagtgaatgttacatattagctgagctgttactgtta

SEQ ID NO: 1504 - DNA, 259 bp, Homo sapiens
aagtgtttcatctgtcgccagagcttccaaaacccagttgtcaccaagtgcaggcattatttttgcgagagctgtgcactgcagcatttccgcaccaccccgcgctgctatgtctgtgaccagcagaccaatggcgttttcaatccagcgaaagaattgattgctaaactagagaagcatcgagctacaggagagggtggtgcttccgacttgccagaagaccccgatgaggatgcaattcccattacttaggtttccc

SEQ ID NO: 1505 - DNA, 180 bp, Homo sapiens
ttttgaatcccgtgtccttcaagtgctttctaactttgagaggaagaaattgaccacctggactatggaactgtgcgtaacagctttgaaagtgtatttaaaaattaaatctatatgcctttaaatcagtgaattggaaacatattacatgtattttaatgattttcctcaaatataata

SEQ ID NO: 1506 - DNA, 38 bp, Homo sapiens
cagtttgctcgatctgctagaccaaaacaagatcctaa

SEQ ID NO: 1507 - DNA, 264 bp, Homo sapiens
  misc_feature (123)..(123): n is a, c, g, or t
  misc_feature (129)..(129): n is a, c, g, or t
ttaaaaataattctggctgagcacggtggctcacccctgtaatctcagcaatttgggaagtggaggtgggcggatcacaaggtccagagatcaagaccatcctggccaacatggtgaaaccgnactctntactaaaaatacaaaaattagctgggtgtggtggcgcctacctgtagtcccagctacgtgggcggctgaggcaggagaatcgcctgaacctgcgaggtggaggttgcagtgagccgagatcaagatcacgccact

SEQ ID NO: 1508 - DNA, 178 bp, Homo sapiens
gggatcgtaggattagaggggctaaggatagtcagcgagctggactggggtaagaaagaaaaccagatgtcctagggcctagcccttgtagtcagaaccaccagggaacagcaaagaacagagtgatgggaaagtgacatgagaaggcctggaggctgattctgatatagactcaata

SEQ ID NO: 1509 - DNA, 293 bp, Homo sapiens
aaaaccaggatatcagaacattttggatggtatctatgtctctgaaaaagggacagttcagcaggctgatgagtaaaatctaagagttgtacagctacagaaacaagatgtcagataattcctaagacctatttgtgatattttaataatgcaataaaagacagctattgaaaaataaagtagtgatgaggtttcaagacatgaatgatgggatttgctgatggctagcactcaggatgtaagggaaagagaaggattgaggctaactattgagttttggtctaagaactgca

SEQ ID NO: 1510 - DNA, 209 bp, Homo sapiens
tccgtcttgtaatgagttgtagtatttactcttaacataggatcatttggaacaggagttctgaggaggagagagtgagggttttgctattgactgacttgaacgatggcttctcctcaagctgtaggctccagagcttcctaacctagtaaaatgtcaagaacagacgggagatattagtgtctttccctctatcattaaaggtgttt

SEQ ID NO: 1511 - DNA, 222 bp, Homo sapiens
ttcttcattagtgaacctctgttcaagttaagtcttgccaaatttgatgcccctttggaagctgttgcagccaagttaggagtgaagagatgcacggatcagatgtcccttcagaaacgaagcctcattgcggaagtcctggtgaaaatattgaagaaatgtagtgtgtgacatgtaaaaactttcatcctggtttccactgtctttcaatgacaccctgat

SEQ ID NO: 1512 - DNA, 269 bp, Homo sapiens
gcttatttgacaacgtttcagcgactccgttggccactccgagaggtgggccagtctgtggatcagagatgcaccaccaagccaagggaacctgtgtccggtattcgatactgcgactttctgcctggagtgtatgactgcacatgactcgggggtggggaaaggggtcggctgaccatgctcatctgctggtccgtgggacggtgcccaagccagaggctgggttcatttgtgtaacgacaataaacggtacttgtcatttcgggcaa

SEQ ID NO: 1513 - DNA, 183 bp, Homo sapiens
ctcctggaaattgacgaggggtgtcttgggcagagctggctctgagcgcctccatccaaggccaggttctccgttagctcctgtggccccaccctgggccctgggctggaatcaggaatattttccaaagagtgatagtcttttgcttttggcaaaactctacttaatccaatgggtttttcc

SEQ ID NO: 1514 - DNA, 135 bp, Homo sapiens; identical to SEQ ID NO: 98

SEQ ID NO: 1515 - DNA, 151 bp, Homo sapiens
aagggtctgggggtctgggtactgtggctcatgcctataattttggcattttgggaggctgaggtgggcagattttttgaggccaggagtttgagaccagcctgggcaacatggcaataccctgtctttacacaacgtacaaaaacttagc

SEQ ID NO: 1516 - DNA, 270 bp, Homo sapiens
agttagagataatgtccaggctgggcgcagtggctcacacctgtgttctcagtactttgggaagccgagtcaggaggatcacttgaggccaggagtttgagaccagcctgggcaacatagcaagaccccatatttacaaaaaattaaaaaattagccaggtgtggtggctcatgcctataatcccagctactcaggaggctaaggtgggaggatcacttgaacccaggagttcaaggctgcagtgagccgcgatcgcaccaaggcactcc

SEQ ID NO: 1517 - DNA, 267 bp, Homo sapiens
gcaaaaaaggagaaagttagccaggtgtggtggctcatgcctgtaatcccagaactttgggaggccgaagtgggtggatcacctgaggtcgggagtttgagatcagcctgaccgacatggagaaacaccgtctctactaaaaatacaaaatcagccaggtgtggtggcacatgcctgtaatcccagttactcaggaggctgaggcaggagactcgcttgaacccaggaggtggaggttgcggtgagccgagatcgcatcgttgcact

SEQ ID NO: 1518 - DNA, 290 bp, Homo sapiens
tatgtggttaagcaaaggagctggaataggtgaacagttttggaagagacggataaggtacaaaggatcactttattcaatttgaatttttccaatataggtaatgtaataaaaactgtgatattgttgtagggatagacccatgaatcaatggaacagaatggggaacatagaaataggcccacataagtacagccaagagatttttgacaaaagcataaaagcaattcaatggaggaagaatagttttttcaacaaatgctgctagagtggttggacgtgcataagca

SEQ ID NO: 1519 - DNA, 60 bp, Homo sapiens
gaagacaagattggaaagtgccttaaaatacaggtgataacaagtaacttttcaattgtt

SEQ ID NO: 1520 - DNA, 300 bp, Homo sapiens
tcttttttccaggctgggcgtggtggctcatgcctgtagtcccagcactttgggaggccgaggtgggtgtatcacctgaggtcagtcaggagtttgagaccagcctggccaacatggtgaaactctgtctttactaaaaatacaaaaaaattagctaggcgtggtggcgggcaccggtaatcccagccacttgggaggctgaggcaggagaattgcttgaacctgcgaggcagaggttgcaatgagccgagattgtgccattgcactccagcttgggcgacaagaatgaaattccatctc

SEQ ID NO: 1521 - DNA, 209 bp, Homo sapiens
ttccccgaacacagcacacggtcaactccgcgggacacgaggacacgggacggcgtctccagaattgcttgttacgtaggaagcgtgcattgttaaccagagtatttttaaaatctttttatcttttttaaactatgtcacatgaaatgaatgcgtctttgctgtctccaggtgcctttttattaattgttcagctttgtacatgggaa

SEQ ID NO: 1522 - DNA, 161 bp, Homo sapiens
tgtttgcattgttttgtcatgtgatgcatcttgccatgtcatgatacagcaggaaggccctcaccagatgccagtgccatggtcttggacttcatagcctgcagaaccacgagctatgtcaacttttctttatgaattacccagtttagggctaggcacgg

SEQ ID NO: 1523 - DNA, 233 bp, Homo sapiens
tgaagccagcagatgttaaggacataggtgggactgttgaagcatcctgcatgaatttttcatggccagctcccactgctcaggtgcacaccagaaaaagaagggtttgggcctgcctgagagtagatgtgtcttccgaggtcagacccgggaaagctttatgaacctgtcaacctatttttggcttttgctttgaagattttacgttgagttaacctttgtggaacagaact

SEQ ID NO: 1524 - DNA, 179 bp, Homo sapiens
acccgtctgcgtacctaagtgtggctccccgtgggtcagcgtcctggtagcatggatccagtctgaaaggtgaggacaacgtggaaactcatgagctgagcctgcccgctgggacacgtctccttcccgcgtcaccttctggtttagggagccgtcaggtccctaaacgttccctacaa

SEQ ID NO: 1525 - DNA, 130 bp, Homo sapiens
gcatggatccagtctgaaaggtgaggacaacgtggaaactcatgagctgagcctgcccgctgggacacgtctccttcccgcgtcaccttctggtttagggagccgtcaggtccctaaacgttccctacaa

SEQ ID NO: 1526 - DNA, 298 bp, Homo sapiens
ggttcaagttcagcatttttactcatggtactccttgacttctgcctgttttgcaaaagagggtctgtagatgacaaaaacatgaaaaagacattcagtggaaatgcagattgaaaccaaaataagagatcactagctattagaacagctaaaataaaaagtagtgacagtaccaaatactcaggaagatgcaaagaaattggatgtttcatgcgttgctggtggagatataaattggtgcatttagaaaatattggaaaatagtagtttctttaaaaagtaaatgcgagactctgtc

SEQ ID NO: 1527 - DNA, 243 bp, Homo sapiens
ggttcaagttcagcatttttactcatggtactccttgacttctgcctgttttgcaaaagagggtctgtagatgacaaaaacatgaaaaagacattcagtggaaatgcagattgaaaccaaaataagagatcactagctattagaacagctaaaataaaaagtagtgacagtaccaaatactcaggaagatgcaaagaaattggatgtttcatgcgttgctggtggagatataaattggtgcat

SEQ ID NO: 1528 - DNA, 256 bp, Homo sapiens
ccagggcatggcaactatgcacaaaatctgaattctgattgaatcctggattaaagggagagaatagctataaagaacataattgggataatttgtgagatttgaatatagatcatatatcagataactagtacagaattattaaatttcttgagagtgataatggtgtggttatgtaggagattcttcttgatcttaggagatacatcctgaagtatttaggaataaaatgtcatgatggcttcaacttccagaa

SEQ ID NO: 1529 - DNA, 245 bp, Homo sapiens
gtttacattgataaagccagatatgttttgacaatgaaatttacatatcaagtactgcaaataaaaggtggtgctatgatatatgcttaggaggacagttttaatgattgtacttgcatgaacacaatcatatgatggtaaagcagaaacttaagaaaaaattgtttatgtgttatattcaattagcttaaataagttgctttgttatattttatttgaattgaactacgctaggcctaaatgcc

SEQ ID NO: 1530 - DNA, 84 bp, Homo sapiens
tagattaagctggaattataatgagagcaataagaacaaatttattttgcttaccacagtgttatagctggttctagaaatttg

SEQ ID NO: 1531 - DNA, 219 bp, Homo sapiens
aggccgtgcataaggctgtgctgaccatcgacgagaaagggactgaagctgctggggccatgtttttagaggccatacccatgtctatcccccccgaggtcaagttcaacaaaccctttgtcttcttaatgattgaacaaaataccaagtctcccctcttcatgggaaaagtggtgaatcccacccaaaaataactgcctctcgctcctcaacccctcc

SEQ ID NO: 1532 - DNA, 268 bp, Homo sapiens
tgttctcttaagcttactcactgacagcctttcactctccacaaatacattaaagatatggccatcaccaagccccctaggatgacaccagacctgagagtctgaagacctggatccaagttctgacttttccccctgacagctgtgtgaccttcgtgaagtcgccaaacctctctgagccccagtcattgctagtaagacctgcctttgagttggtatgatgttcaagttagataacaaaatgtttatacccattagaacagagaat

SEQ ID NO: 1533 - DNA, 137 bp, Homo sapiens
gaaagagcttatcaataagcccttaaaggatttagataaatgtgtgtaagggaagagctgatccattgctaccaagctcctggaggaaaccaggtctcagaggatgtccctaaacttttaaggttcatattcaggaa

SEQ ID NO: 1534 - DNA, 46 bp, Homo sapiens
tgacgtcagccatgtacaggatccacaggggtggtgtcaaatgcta

SEQ ID NO: 1535 - DNA, 136 bp, Homo sapiens
ccctgctctcccaaaaaaatacaaaaattagctgggcgtgctggtgtgcctgtattcccagctacttgggaggctgaggtgggaggattgcttcagctggggaggcggaggctgcagggagccaagactgagccat

SEQ ID NO: 1536 - DNA, 169 bp, Homo sapiens
attggtgactcacttcaatgtgtcatttccggctgctgtgtgtgagcagtggacacgtgaggggggggtgggtgagagagacaggcagctcggattcaactaccttagataatatttctgaaaacctaccagccagagggtagggcacaaagatggatgtaatgcactt

SEQ ID NO: 1537 - DNA, 36 bp, Homo sapiens
caccttctccatttcacaccggtggtacaagaaatc

SEQ ID NO: 1538 - DNA, 92 bp, Homo sapiens
acaggcagctcggattcaactaccttagataatatttctgaaaacctaccagccagagggtagggcacaaagatggatgtaatgcactttgg

SEQ ID NO: 1539 - DNA, 131 bp, Homo sapiens
gtgggtgggagggtgtgccactggccacccctccccagtacaggggtgctgcaggtggcagagtgaatgtcccccatcatgtggcccaactctcctggactggccatctccctcgccagaaacagtgtgca

SEQ ID NO: 1540 - DNA, 144 bp, Homo sapiens
caatatcactctcaggtccagcgcagtggcccacgcctgtaatctcagcactttgggaggccggggcaggaagattgcttgaggccaggagtttcagaccagcctggacaacatagtgagactcttcctctaagaaaagaaaga

SEQ ID NO: 1541 - DNA, 140 bp, Homo sapiens
cagtgtgcatgggttattttggagtgtaggtgacttgtttactcattgaagcagatttctgcttccttttatttttataggaatagaggaagaaatgtcagatgcgtgcccagctcttcaccccccaatctcttggtggg

SEQ ID NO: 1542 - DNA, 48 bp, Homo sapiens
ccatttcacaccggtggtacaagaaatcagaagcctaggccaggtgtg

SEQ ID NO: 1543 - DNA, 127 bp, Homo sapiens
gggcccctaatatcccagtttaatattccaataccctagaagaaaacccgagggacagcagattccacaggacacgaaggctgcccctgtaaggtttcaatgcatacaataaaagagctttatccct

SEQ ID NO: 1544 - DNA, 224 bp, Homo sapiens
tgttacttcgttcctcctcctattttgagctatgcgaaatatcatatgaagagaaacagctcttgaggaatttggtggtcctctacttctagcctggttttatctaaacactgcaggaagtcaccgttcataagaactcttagttacctgtgttggataaggcacggacagcttctctgctctgggggtatttctgtactaggatcagtgatcctcccgggagg

SEQ ID NO: 1545 - DNA, 237 bp, Homo sapiens
tccagctacaatacttccatttattagaagcacattaaccatttctatagcatgatttcttcaagtaaaaggcaaaagatataaattttataattgacttgagtactttaagccttgtttaaaacatttcttacttaacttttgcaaattaaacccattgtagcttacctgtaatatacatagtagtttacctttaaaagttgtaaaaatattgctttaaccaacactgtaaatatt

SEQ ID NO: 1546 - DNA, 172 bp, Homo sapiens; identical to SEQ ID NO: 138

SEQ ID NO: 1547 - DNA, 145 bp, Homo sapiens
gttttattaccttttgatatctgttgttgcaatgttagtgatgttttaaaatgtgatcgaaaatataatgcttttaagaaggaacagtagtggaatgaatgtttaaaagatctttatgtgtttatggtctgcagaaggatttttg

SEQ ID NO: 1548 - DNA, 234 bp, Homo sapiens
tcactgcagtgctcttcatagacacatcttgcagcatttttcttaaggctatgcttcagtttttctttgtaagccatcacaagccatagtggtaggtttgccctttggtacagaaggtgagttaaagctggtggaaaaggcttattgcattgcattcagagtaacctgtgtgcatactctagaagagtagggaaaataatgcttgttacaattcgacctaatatgtgcattgta

SEQ ID NO: 1549 - DNA, 281 bp, Homo sapiens
acacagaggtaatcactattagtattttggcatattattctccaggtgtttgcttatgcacttataaaatgatttgaacaaataaaactaggaacctgtatacatgtgtttcataacctgcctcctttgcttggccctttattgagataagttttcctgtcaagaaagcagaaaccatctcatttctaacagctgtgttatattccatagtatgcattactcaacaaactgttgtgctattggatacttaggtggtttcttcactgacaatactgaataaa

SEQ ID NO: 1550 - DNA, 175 bp, Homo sapiens
agactggagagcaagcccagcccagcctcggcatagacccccttctggtccgcccgtggctcgattcccgggattcattcctcagcctctgcttctcccttttatcccaataagttattgctactgctgtgaggccataggtactagacaaccaatacatgcagggttgggtttt

SEQ ID NO: 1551 - DNA, 269 bp, Homo sapiens
tagactctgctaaaacagtgctctggcttgggcttacctcaagagggaagatagttgagttttatttcctgtatatcaggtgacctggtagagatgtaaagcaatttaccatagtttgggctttagtattgtaaaataaacatgagaacaaataatcagacatatactttaatgttaaaggtgctctatttttttggatgtacagtagttttatttccacagccacattaccatagcaataagaaaggaggcatagtacatagttggaa

SEQ ID NO: 1552 - DNA, 271 bp, Homo sapiens
  misc_feature (181)..(181): n is a, c, g, or t
  misc_feature (184)..(184): n is a, c, g, or t
caaagagaacctggatgccgatgagggtgatgggaaaagtaacgacctcgtccttagttgtccttactttagaaatgagactggaggggaaggcgacaggcggattgcgctctctcgagccaactcatcctctttcagttctggggaaagctgctctttcgaatcgtcactcagctctcantgnacaaatgcaggtgtctccgtcttggaagtgcccagagaaaaccagcctattcacagggagaaagtgaagcgctacatcatagaacac

SEQ ID NO: 1553 - DNA, 264 bp, Homo sapiens
aatgaaatgctccacataaccgtattttccaaaaattcaaagtctgtatctttaatttgttgtgttctttaggcccttggtttcttaaacagagcataataaacatccctttttatgatgagaactttttctgttatgaagcttcagcttaaagttgataaagttgttacagttattgatatttgaccactgtgtgtatgagagagtgtgtgtatataagtataaacaaaatgtgacttactgagtaactcctagtggtaacat

SEQ ID NO: 1554 - DNA, 197 bp, Homo sapiens
gaagtgtcttgtatttaacacccttatttaagcttatttaaccttaaattgttaattttataaaatttggtttggcctgcactacgatgagggatggaggtagctgcaggctcagaagagactgagcttgcacagatcagaccgagaagcagggtgagagattctaacgactggatgctgctagtaacacattgttt

SEQ ID NO: 1555 - DNA, 212 bp, Homo sapiens
gtcatccaagtttagtgagaattggtgggaaggcaagaaatggaaataaggaaggatgggcacttggtcaatatttacatagactttacccaaatattgggctttttgtaaacatagaatctgttgcttcttaaagcctaagcccgttggaaattggggtaatgtgagcaatttctttctttccatcaaagaggtggtatggcatgcaagaa

SEQ ID NO: 1556 - DNA, 124 bp, Homo sapiens
gtcagtttgcaacatgtctgtaccaagatggtactttgccttaaccgtttatatgcactttcatggagactgcaatacgttgctatgagcactttctttatccttggagtttaatcctttgctt

SEQ ID NO: 1557 - DNA, 258 bp, Homo sapiens
gtgatctctgtattcatgcctggaagccccctggacttgtccgtttctccttttgaagatatccgatcaaggttcattcaaggagagtcaattacacctaccaagatacctgaaattacaactgaaatatacatgtctaatgggtctaattctgctaatattgtcccggagacaagtcctgaatctgtgcccataatctctgtcagtctgctgtttgcaggcgtcattgctgctagaatcggtctttggtcctttgat

SEQ ID NO: 1558 - DNA, 243 bp, Homo sapiens
gtatttccgatttgcccaaaatactctgggaaacaagctctttgcttgcggtcctgatgcaaaagaagttaggaaggaaaatcaagcaaatacatctgttgtttgagacagtttaactgttgctatcctgttactagattatatagagcacatgtgcttattttgtactgcagaattccaataaatggctgggtgttttgctctgtttttaccacagctgtgccttgagaactaaaagctgtt

SEQ ID NO: 1559 - DNA, 162 bp, Homo sapiens
ttatgcactgaacgtaggggcattagagtagaaggttgcctcaggttagttttgtgtggggttgaatgccttttatttctgacttcatttctatctgccaatggatcaatgcattttactctatattatcaaaatacaatatagtgtaagaagtggatcctg

SEQ ID NO: 1560 - DNA, 279 bp, Homo sapiens
aaaagcaggactttggtgcctgtgctataagcagcagattttgtgggaggaaacacttgagaggcgatattgtcaacagtatttgaagggtgttagcagaataaaagacagctttagtcagccgtgtcattataaagcatgttgtgtggcctcacagaaacattgaaactgtttatacagcaaaagtcaggtattagcagcactaaagcaaatatcactcagatgaaacaaagcagtgaaaccctacagtttaaatgatgtcacttttagtgctgttgg

SEQ ID NO: 1561 - DNA, 250 bp, Homo sapiens
agtcagttcaccacggctttgaagtcgtgtatgaactgaccaagatgtgtactatccggatgagttttgttaagggttggggtgctgagtatcatcgccaggatgtcaccagcaccccctgctggattgagattcatcttcatgggccactgcagtggctggacaaagttctgactcagatgggctctccacataaccccatttcttcagtgtcttaacagtcatgtcttaagctgcatttccataggat

SEQ ID NO: 1562 - DNA, 202 bp, Homo sapiens
tttgtctttccctgttacgattttaatagcagaactgtatgacaagtttaggtgatcctagcatatgttaaattcaaattaatgtaaaacagattaacaacaacaaagaaactgtctatttgagtgaagtcatgctttctattataataacttggcttcggttatccatcaaatgcacacttatactgttatctgattgttt

SEQ ID NO: 1563 - DNA, 216 bp, Homo sapiens
ttggagaggagttgcctcccccagtctcacagtgcatcagcgatggatcctgcctgaaaccccaactcccatgatctctgtacagcattattcccatcctccgtttatggtataatatggccatattttatccctcctggactccaacattgctcaacacccggagtcaggggatttgttgttgttgttgttttagagacaacacagtcatggttc

SEQ ID NO: 1564 - DNA, 186 bp, Homo sapiens
gagtagattgattcaccctacccacaggacattcaccaagccactgataccattttatatttcatcaattgcatgagtatttgctaatgttgattgaacctccctttccccataatgtgggcagatttggttcagctccttcatgagatcaggtcagtggtattgtttctgtcaagagtgtttttt

SEQ ID NO: 1565 - DNA, 49 bp, Homo sapiens
aaaaattggctggtggtagtggcacacctctgtaatccccggtactcag

SEQ ID NO: 1566 - DNA, 107 bp, Homo sapiens
ggagactagagggctacaggccagcgtggatgacctgaagagcgctcctctgccttggacaccatcccctcctagcacaaggagtgcccgccttgagtgacatgcgg

SEQ ID NO: 1567 - DNA, 70 bp, Homo sapiens
tggacctatgatgatgactggtggcgtatgagtcattgacggtgaatacaggtctggaagtctgaggtcc

SEQ ID NO: 1568 - DNA, 35 bp, Homo sapiens
agtcattgacggtgaatacaggtctggaagtctga

SEQ ID NO: 1569 - DNA, 45 bp, Homo sapiens
tagatcagtgatgactactgttggtgtatgagtcatatacgatga

SEQ ID NO: 1570 - DNA, 61 bp, Homo sapiens
tagatcagtgatgactactgttggtgtatgagtcatatacgatgaatacatgtctgaaatt

SEQ ID NO: 1571 - DNA, 56 bp, Homo sapiens
taaaacttgctggcatatgaatcttggataatggatgatacgtgtgtggaactctg

SEQ ID NO: 1572 - DNA, 66 bp, Homo sapiens
ggatcaatgataaaacttgctggcatatgaatcttggataatggatgatacgtgtgtggaactctg

SEQ ID NO: 1573 - DNA, 74 bp, Homo sapiens
tgagcaagcgatgacagccggtggtgtgtgagtcatggaggatgaatactaagtgcctggaactctgaggttca

SEQ ID NO: 1574 - DNA, 74 bp, Homo sapiens; identical to SEQ ID NO: 1573

SEQ ID NO: 1575 - DNA, 91 bp, Homo sapiens
gtgatgaaaaagaatccttaggcgtggttgtggccgtcttggtcacctgtgtgccacttgccaatgcaaggacttgtcatagttacactga

SEQ ID NO: 1576 - DNA, 93 bp, Homo sapiens
gtgatgaaaaagaatccttaggcgtggttgtggccgtcttggtcacctgtgtgccacttgccaatgcaaggacttgtcatagttacactgact

SEQ ID NO: 1577 - DNA, 195 bp, Homo sapiens
actgtgaacttcaaaccaggttgattttagtaacccaattgctttgatttgacattaatgtagttttacagggctgtgcttgctgggcatgcttttacgtctgtgagataatttcggttcagtaaattggccaatctttttatttttttaagacacagaaatgtatttaataaaaacctcgagagagtgatgggt

SEQ ID NO: 1578 - DNA, 266 bp, Homo sapiens
catcctatcaggtttggtcagtcccttcttcatgaagggagtcatggggaattcctgaaaattttcttccttctgcagacagttggatgagtcccttagagaaggcatccagagacataactaaactgaatatcatcccatattgattttaggaattgactctaaaactctgtgcagaatcttgtgttgggattgtatcttgacattcctgttgtgttatttttcttaactggagtgtgtgctgcctttcaggtacaatttttgtg

SEQ ID NO: 1579 - DNA, 109 bp, Homo sapiens
aaaactgctgccttttgaacaattcttacaaactattaaatgtggattatgatataatgcacacaaatcactctctgtgtatctgttaatactttttgtgtcagaaatg

SEQ ID NO: 1580 - DNA, 197 bp, Homo sapiens
aatttcaattgcctcgataagtttccaagtcactgaaatttgctgaaggttttactgtattgttgcacaactttaagataatttttgtttcaatgtcaacttttttcactgaataaaaatttaactgggtcaagaaaacacctctttgaaaatccactgtctctgtgtgtctcgagctgttctttagagcgcaataa

SEQ ID NO: 1581 - DNA, 248 bp, Homo sapiens
tgcccatcttattcctgatactgctgagcctgggggtggggtttgccatcctgtacacgaagcaccggaggctgcagagcagcttcaccgccttcgccaacagccactacagctccaggctggggtccgcaatcttttcctctggggatgacctgggggaagatgatgaagatgcccctatgataactggattttcagatgacgtccccatggtgatagcctgaaagagctttcctcactagaaacca

SEQ ID NO: 1582 - DNA, 94 bp, Homo sapiens
gccttttgaacaattcttacaaactattaaatgtggattatgatataatgcacacaaatcactctctgtgtatctgttaatactttttgtgtca

SEQ ID NO: 1583 - DNA, 195 bp, Homo sapiens; identical to SEQ ID NO: 1577

SEQ ID NO: 1584 - DNA, 176 bp, Homo sapiens
tgcagagcagcttcaccgccttcgccaacagccactacagctccaggctggggtccgcaatcttctcctctggggatgacctgggggaagatgatgaagatgcccctatgataactggattttcagatgacgtccccatggtgatagcctgaaagagctttcctcactagaaacca

SEQ ID NO: 1585 - DNA, 164 bp, Homo sapiens
taaatggaaggcaagtcctactcatttttccttccagttgctattgagagaacacataggtacacagttgtctttcctttcttgcccttgtttgcttttggagcaactgagctggctttggcagtctcagtgcctgccttcacagacagcgtgtcatggaaggt

SEQ ID NO: 1586 - DNA, 298 bp, Homo sapiens
  misc_feature (85)..(85): n is a, c, g, or t
  misc_feature (128)..(128): n is a, c, g, or t
  misc_feature (168)..(168): n is a, c, g, or t
  misc_feature (204)..(204): n is a, c, g, or t
  misc_feature (219)..(219): n is a, c, g, or t
  misc_feature (224)..(224): n is a, c, g, or t
  misc_feature (235)..(235): n is a, c, g, or t
agaacaaccttcttgtgggagagttggataccttggaaacatgttcactttccatccacctaagatcttcctcttccagcaccgncatcccctctactggccctctgcatagccgacttcatcattgntacctgtgcccatgtggttcctcaagctgagatccgcttncatagtgttcttcttatctgtccttctaacaagctntcattgatgatttgngttgngacgtggacangcaaccttagagccttctgccattacttaactgccattagtgcatgaccttgcttaagaatgg

SEQ ID NO: 1587 - DNA, 67 bp, Homo sapiens
catccatcctgtgcaatatgccgtgtagaatatttgtcttaaaattcaaggccacaaaaacaatgtt

SEQ ID NO: 1588 - DNA, 141 bp, Homo sapiens
gcggaggaggacacgaactggaagggggttcacggtcaaactgaaatggatttgcacgttggggagctggcggcggcggctgctgggcctccgccttcttttctacgtgaaatcagtgaggtgagacttcccagaccccgg

SEQ ID NO: 1589 - DNA, 151 bp, Homo sapiens
ttcgcccgcgttctcgtcgtcggatcaaggagcgcggcggcgttttggacccgcgctcccatcccccaccttcccgggccggggacccactctgcccagccggagggacgcggaggaggaagagggtagacaggggcgacctgtgattgtt

SEQ ID NO: 1590 - DNA, 173 bp, Homo sapiens
ggcttcctaccttgcaacaaaataattgcaccaactccttagtgccgattccgcccccagagagtcctggagccacagttttttttgctttgcattgtaggagagggaataagtgctagagactatgtcgctttcctgagctaccgagagcgctcgtgaactggaatcaactg

SEQ ID NO: 1591 - DNA, 34 bp, Homo sapiens
acagaagggcagtgactcgacaaaggccacaggc

SEQ ID NO: 1592 - DNA, 42 bp, Homo sapiens
tccagcctgggtgattggggtgattgggcgagactctgtttt

SEQ ID NO: 1593 - DNA, 75 bp, Homo sapiens
aaatgcctcccttttcagtaccttggaacagcaaccatggggggtactcagaatggggttaattcttgggaaata

SEQ ID NO: 1594 - DNA, 204 bp, Homo sapiens
gttaaggatggctcagcacttgctcattttggatggcttttgggccaaaactgcagtcactgaatgaccaagagcagcacgaaggacttggaacctatccttgtaaagagttccttgatgggtaatggtgaccaaatgcctcccttttcagtacctttgaacagcaaccatgtgggctactcatgatgggcttgattctttggg

SEQ ID NO: 1595 - DNA, 270 bp, Homo sapiens
ttatgaaaaatactgagtaggccgggcacggtggctcaagcctgtaatcccagcactttgggaggccgaggcaggtggatcacctgaggtcaggagttcaagacccacctggcgaacatggtgaaactctgtttctaccaaaatacaaaaattagctgggcatggtggcaggctcctgtaatcccagctactggagaggctgaggctggagaatcacttgaactggggaggcagaggttgcagtgagccgagattgagcccactgcactc

SEQ ID NO: 1596 - DNA, 280 bp, Homo sapiens
acttcattttggaaatgcttctccaccaaataagggctttttcccctatttaaggagccagatggattgaaagatgtggaaataggcagctgtagatcttgatcttccaggtaccccatgtacctttattgagcttaattataatactgtcaaattgccacgatctcactaaaggatttctatttgctgtcagttaaaaataaagccctaaatacatttttattctttctactgagggcattgtctgttttctttgtaaatgccgtacaataaacaaatt

SEQ ID NO: 1597 - DNA, 89 bp, Homo sapiens
gtactccagtgtgggtggcacaccaagatgcattctttgacaaaaagatttgttaaataaaaagataacctgaatgcaattattatacc

SEQ ID NO: 1598 - DNA, 68 bp, Homo sapiens
tgcagtgagccgagagctgagatggcaccactgctctccagcctgggtgacaaagcaaggctctgttt

SEQ ID NO: 1599 - DNA, 170 bp, Homo sapiens
ggaaaagctcctctagttagctgaaactgggacctaataaaaggaggaaatgttttcccacagttctagggacaggactttgaggtgggtgagtttgacaaatcctgcagtgtttccaggcatccttttaggactgtgtaatagtttccctagaagctaggtagggactg

SEQ ID NO: 1600 - DNA, 293 bp, Homo sapiens
agggggaaaatctattaccccatcatccagaggcaactgctattaactttttggtattttccttccagtcttttttctatacatactttaaaaaatatatagttgagattgtactgtacatccataaatcatccttttcacttttcattaacaaagtaattttcccatgttatttaaaaattcttcagaaatatttttaatgacagcataatattctactctaaaaatatatcgtaatttgcttaacccttctcccaccaatgaacgtttaagattcctccaacttatttctg

SEQ ID NO: 1601 - DNA, 233 bp, Homo sapiens
ctgactgctgttcctatgtcttttgcaaagagaagtctttgacaggtatatgctttattaaaatcatgtttagaaagaaatgagagaatagaattagaaaaaggaatgactgtaggcttcgatgaaaatgacttttgtgactaggtgaaaattgtttggctgggtatcctggaaaattgtcttctgggaatatctatattccagggttcacttttgtcatagaattgtttctt

SEQ ID NO: 1602 - DNA, 239 bp, Homo sapiens
ggtctccatttaaagggcccacactacaaattatgatttgtctaatgtcaccattttatggaccattttttatttacattgtggcagaagggtacttttcaagggaaatgagtaaactggaactaatttttaaaattctacttgcatagtattagtactattaataataccttttacacaaatatttttgactttaaagcactttcatgtaaaaagtaactatgactgtataattgcat

SEQ ID NO: 1603 - DNA, 132 bp, Homo sapiens
cctccgccctcctgacatacactggccctcgccgccccctccccaaatcccgtcgcactccaggaccccccatacccggatcccatagggcctgggaacggccgcgctcctgtcttcggaattcccgcggcc

SEQ ID NO: 1604 - DNA, 203 bp, Homo sapiens
ccgcgggaggctggaagggctggcagatcgcttccctcatccacctccaccggtccaggtctttgctgctgtccccagacctcctgtgacaccacgccagatcacagggcaccaggccagagatagttttctttttgtcctttctggcctctggctagtcagtttttcatagccttacagtatctggctttgtactgagaaat

SEQ ID NO: 1605 - DNA, 228 bp, Homo sapiens
atgggatccctaaatgtatctgtgatatttggctttctaaatatgatactctggggaggaaatgcttggtttgtgtacaaggagaccagcctacacagtccatcaaatacatttgcccctcatagccaaggaggtattccacctcctaccggaatataattaaagggagaaatacactgtatgaagtatatgttgatactatgacatgttgccaacaccttgagaagc

SEQ ID NO: 1606 - DNA, 244 bp, Homo sapiens
gaagcacatcttgctgttgccttatttttgatgcttttattcatgacaagaattgtcaatataagaatgtatattttttttgcaaccaatttaataaaggagttgaaagaaagagtgcactgattgttaatattacaaagaaaccttcattttaaaggcattgagcagtgcaaaacagaactgattttcaaagcaggaaatagaatcacagttttaatgtttggcaaggaataaaacagacaga

SEQ ID NO: 1607 - DNA, 32 bp, Homo sapiens
taataaaatctccaaccacagcataaaaaaaa

SEQ ID NO: 1608 - DNA, 189 bp, Homo sapiens
cccatgcaggccggtgtgccctggctgctcttgacaccctctggctcctgacaccctctcttcggctgcctgcgttaggaagggagaacctgccagttttcagaagaaaatgtagctttattataacataggaaagactgcaagttattacgggaggaggaggaggcctgaaacagctcctgaaaatga

SEQ ID NO: 1609 - DNA, 139 bp, Homo sapiens
aaaatgcacattgctataccatagcctggggcttgcaatccaaggctggcaaggattcctgcacgtcaagggcctcaggtgactttcatgcacacccaagtcagaaggctctcctgaatcctggatgtcaccttcctgc

SEQ ID NO: 1610 - DNA, 99 bp, Homo sapiens
ctggttcagtgtgaatcaaaccgcttaacccacacatggtacatgtgattttcttttgtgagccttacaccaagccaaactattgtcaaagcatcattt

SEQ ID NO: 1611 - DNA, 277 bp, Homo sapiens
ttatgggcagagtatgcaaaaaccttaagtggaaaccaaatagaccctggtatcaagaaagcacaaagtattaatagaagtttctggttggggtgatctaggttcaacagaaataagatgatttctaagtataaagccatttaagaattccagagtagggtgggaaagcaaaaagccagctctgaacaggtaacagctacatggtgactgagtctatgggcaaaagttcttgcatcacaggcttttgggaactagcctatcacagggccctgtacaa

SEQ ID NO: 1612 - DNA, 267 bp, Homo sapiens
aaaaaatgtcagctgctggcccgttcgcccctcccggggacctgcggcgggtcgcctgcccagcccccgaaccccgcctggaggccgcggtcggcccggggcttctccggaggcacccactgccaccgcgaagagttgggctctgtcagccgcgggtctctcgggggcgagggcgaggttcaggcctttcaggccgcaggaagaggaacggagcgagtccccgcgcgcggcgcgattccctgagctgtgggacgtgcacccaggact

SEQ ID NO: 1613 - DNA, 298 bp, Homo sapiens
tctggattgtggttccatgcagccttggggcattatgggttcttcccccacttcccctccaagaccctgtgttcatttggtgttcctggaagcaggtgctacaacatgtgaggcattcggggaagctgcacatgtgccacacagtgacttggccccagacgcatagactgaggtataaagacaagtatgaatattactctcaaaatctttgtataaataaatatttttggggcatcctggatgatttcatcttctggaatattgtttctagaacagtaaaagccttattctaaggtgt

SEQ ID NO: 1614 - DNA, 241 bp, Homo sapiens
caattactgcttccggtgagactgggcccacatgggaaccaacatctactgcctgcctactgcccaatggctaggtcaggccccagagccaagccacactcaacagagggtccctgatactattcacaaacatctccaggaagaagactgaaaatctctcacagagattttctctgtgaaatctctttctgttttcctgggagtcccactgtttttccataggctaactctggaaggagct

SEQ ID NO: 1615 - DNA, 139 bp, Homo sapiens; identical to SEQ ID NO: 80

SEQ ID NO: 1616 - DNA, 282 bp, Homo sapiens
gcaagtgacttgaatacatagtaatttgacattctatccctaaaaaaaattactgcagaagaatgttcacactgtttgcaattatcctatttttggtgatagtgttgtgctggatatgatgattgggcatataatgtgtgagaaggtaaatgagtaattagatgatagtataattctgttagccccaatatccttgagaagtaggatgttcaaacttaggagaaagtagatacagatacaagatagatattgtatggcttaagtccgcaataaaaagcctgt

SEQ ID NO: 1617 - DNA, 58 bp, Homo sapiens
atcttgtcacttctaaggaacatactctgaacaaataagcaacaaatcattgcccata

SEQ ID NO: 1618 - DNA, 32 bp, Homo sapiens
atagcaccattgcacaatctaaactgggccac

SEQ ID NO: 1619 - DNA, 274 bp, Homo sapiens
actgaggtaggtgaatgccatggaattttatatggcagttagaaagcagttatctagatggacatttcagcaacaaagacagtgtaaaaagcaaagggaaaacccagtaacatttatgtaaattacatgtctgtatcacattagtgtaggtgcttgttgggatagccagggactgatggtggtggaatctggcataaagggaaaaataagacaagacaggtggaccttatacaacaaaattgccacaggctaaagagtctgattaattcacctt

SEQ ID NO: 1620 - DNA, 160 bp, Homo sapiens
attttgaaaaatggtctcggccaggcgcagtggctcatgcctctaatcccagcactttgggaggctgagatgggcagatcacctggggtcgggagttcgggaccaacctgaccaacatggagaaaccccgtctctgctaagaatacagaattagccaggt

SEQ ID NO: 1621 - DNA, 193 bp, Homo sapiens
aaaagttttttgggctggatgcaatggctcacacctgtaattccagcactttgggaggccaagatgggaggattgcttgagcccagcagttcaagaccagcctgggaaaccccatcttgacaaaaaacgcttaaaaattagctgggcatggtagggcatgcccatggtcccggttaattaggaagctgaggta

SEQ ID NO: 1622 - DNA, 284 bp, Homo sapiens
ggcgggcagggaggttcatgtctgtaagcccagcgctgtgggaggccaaggcaggaggactgcttgaagtcaagagttcacgaccagcctgcgcaacatcaagtgagaccccatctctacaaaaaaatttaaaaatcagccagatgcggtgacacatgcctatagtcttagctacttgggaggcttaggcatgaggatcacttgggcccaagaggtcagggctgcagtgagttgtaatcgtgccactgcactccagcctgggcaataaagcaagacactatatc

SEQ ID NO: 1623 - DNA, 300 bp, Homo sapiens
gcattaagatgagagacgggccaggcgcagtggttcatgtctgtaatcccagcactttgtgaggctgaggtgggcagatcacgaggtcaggagttcaagaccagcctggccaacatggcgaaacctcttctctactaaaaatgcaaaaatcagccgggcgtggtggtgggcacctgtaatcccagctactcgggaggctgaggcaggagaatcacttgaacgtgggagggagaagttgcagtgagccaagattgtgccattgcactccagcctgggtgataagagcaagactcttgcctc

SEQ ID NO: 1624 - DNA, 294 bp, Homo sapiens
aatttaatcagagaatcggccggaagcagtggctcacgcctgtaatcccagcacttgagaggccgaggtgggcgggatcacctgaggtcaggagctcaaaatcagcctggccaacgtggtgaccccccatttttactaaaaatacaaaaattagccaggcatgggggcgggcccctgtaatcccagctacctaggggggtgaggcagggcagtcacttgaacctgggaggtggaggttgcagtgagccgagattgcgccattgccctccagcttggatgccaagagcaaaactc

SEQ ID NO: 1625 - DNA, 296 bp, Homo sapiens
aaagaagccaagatgtgcgaggcgcagtggctcacacctgcaatcccagcaatttgggaggctgaggcaggcagatcgctttgagctcaggagttcaagaccagcctgggcaacatggtgaaaccctatctccacaaaaaatgtaaaaattagccgggcattggtggcgtgctcctgtagtgccagctttggaaggctaggctggagaattgcttgggcccgggaagcagaggttgcagtgagctgagatcacgccactgcactccagcctgtgtggcagagtgagatctcgcctc

SEQ ID NO: 1626 - DNA, 223 bp, Homo sapiens
ctcatgtttgtaatgctggtagcactttgggatgctgaggcaggcagatcacgtgagcccaggagttcgagaccagccctgggtgaaacccgtctttacaaaaaaaataataataattgaaaaatagaaaaaatgttagctaggcatggtggtgtgtgcctatattcccagctactgaagaggctagggtgggaggattacctaaacacagggaggctgacgc

SEQ ID NO: 1627 - DNA, 238 bp, Homo sapiens
tactctgtgtgatattacactggcggatgcatgtcactgtgcacttgtccagacccacagaatgtgcaccccgaagtgtgaaccctcgtatggactatgaactttaagcaataatgacatgtccgtgtagggtcatcagttacacatgtaccagtctgatgtgggatgatggtagtaagggaccctgtgcctgtgtggtgggaggaggtgtgtgggaactctgtacttctactcactt

SEQ ID NO: 1628 - DNA, 194 bp, Homo sapiens
gtcccaaggcacaaggctacttgcaccagcagtgtgctccagcaaaatagcagaagcaggaagagagccagccggaagacacgtacccctgaaaatcaagaaagaggccatccgggtacaacatagcagtaatgtcagactaggacacttcctgtttacaggagactataaaactttcgccctgtcctcacttg

SEQ ID NO: 1629 - DNA, 42 bp, Homo sapiens
gataatggtgatagtggtggtggccgggcagggtggctcatg

SEQ ID NO: 1630 - DNA, 289 bp, Homo sapiens
actgaggtaggtgaatgccatggaattttatatggcagttagaaagcagttatctagatggacatttcagcaacaaagacagtgtaaaaagcaaagggaaaacccagtaacatttatgtaaattacatgtctgtatcacattagtgtaggtgcttgttgggatagccagggactgatggtggtggaatctggcataaagggaaaaataagacaagacaggtggaccttatacaacaaaattgccacaggctaaagagtctgattaattcacctttctgctcctgaggtt

SEQ ID NO: 1631 - DNA, 267 bp, Homo sapiens
gggtcactctgcaaggtgatctcccagctcccattttcccatttgggaaggaggacccaagtccctgtggctttgggttcccaaaactctctgtagttttctattcccacccccaggtggttctaccctgggctgggtatgggggaggctgcatgaggtgaaggaaaaagttccacactggaaactttagtccctccgtgccagtctcccctcctccctcagctctcaaagggattaacccttgtcatggctgaaattgtggctccc

SEQ ID NO: 1632 - DNA, 279 bp, Homo sapiens
gagttagattagaattgcccagtttttgtgtgtgtaggtttgctttgggatgagatgtccagcagaaaatcacaatggaaataattgatttaaagacactaaataaaaatgtatttatttaataattataaataaaattagaagatgaaaagcaaacgaaaacaaggtcctaacttgacaaaataagggctaacaatgttaatgaagaaagagcttttaaaaatcatttcaaaacatggccgggcacgggtggctcgcggagcgagtctcacagagcga

SEQ ID NO: 1633 - DNA, 147 bp, Homo sapiens
gtcccaaggcacaaggctacttgcaccagcagtgtgctccagcaaaatagcagaagcaggaagagagccagccggaagacacgtacccctgaaaatcaagaaagaggccatccgggtacaacatagcagtaatgtcagactaggaca

SEQ ID NO: 1634 - DNA, 264 bp, Homo sapiens
ttttttcttggcctgtgtacgggattgcctcatttcctgctctgaattttaaaattagatattaaagctgtcatatggtttcctcacaaaagtcaacaaagtccaaacaaaaatagtttgccgttttactttcatccattgaaaaaggaaattgtgcctcttgcagcctaggcaaaggacatttagtactatcgattctttccaccctcacgatgacttgcggttctctctgtagaaaagggatggcctaagaaatacaactaa

SEQ ID NO: 1635 - DNA, 291 bp, Homo sapiens
  misc_feature (40)..(40): n is a, c, g, or t
  misc_feature (43)..(44): n is a, c, g, or t
  misc_feature (46)..(46): n is a, c, g, or t
  misc_feature (73)..(74): n is a, c, g, or t
  misc_feature (78)..(78): n is a, c, g, or t
tgtctatattcactgcagggctctatgattagtccataangtnnangcctggcccaagacgtatggcctgagnnttanccaaggcccaaacaattaccaaacattcctcttagatagaagacagatttctttcccttggcaaagatcttctactaagatatgttacaggatgttttacattctcttggtcttataataacaccacgcccaatccagtatttgatgcgtcggtggtcactcggaaggttgttattttaaaaatacttattgttctcagtctgcagttctcac

SEQ ID NO: 1636 - DNA, 266 bp, Homo sapiens
agaaagccctggcaaaaaagctgagaggcctggtgcagtggatcacgcctgtgatcccagcacgtttggaagccgaggtgggcagattgcttgagcccaggagttcgagaccagcctggacaaaatggcaaaaccccatctctgctaaaagtacaaaaagcagctggatgtggtggcactcacctgtaatcccaggtactcaagagactaagacacgagaatcacttgaacccaggagacacagggtgcagtgagcctcctgcact

SEQ ID NO: 1637 - DNA, 279 bp, Homo sapiens
ttagtgggtgggaacacacacacacacacacacacactctttatttgaggcaccctggaaaatgaaaagctatctggagaaagtaatcatgtgagaagatggccttgaagatagcagcttgattttctttgaaagaaaaaagtggaccaatttacagtagtgactttgctaaaaggctgaaaagagttgagtgtattttctcttcagtctctctttttctaaaggaaacacgtcatggattgattggaaaacatgatcttctagttatcaaatgcttta

SEQ ID NO: 1638 - DNA, 34 bp, Homo sapiens
ttgctttgttgacaagcgtgtgctttttttggcc

SEQ ID NO: 1639 - DNA, 246 bp, Homo sapiens
gttaaactgtccgtgagacaagaaagccattggggaaaccaggtgattgcctgaaatttttactccgttccaagtgctgttcctcccaggaaatcaaaggccagggtccttatggccgtggagccttcccgaccacagagccaacttgtgaagcacacagctttgcagcctgggctttgccctgcctcagccgcctcccccacgcttttcaccacgttcctggagagtccggccaacctgtcccag

SEQ ID NO: 1640 - DNA, 232 bp, Homo sapiens
ttctttgctcaagggcctttagatgtaacaacacagacatgatacaaggctgacaatgacattatgatttaaatatgttaaacaacttattaaattgtgaatcaacaaaaaattatgttctttattttatggttttgcatagtcctgactcactgcctacatatccctcttgttcctcagcttttatccctgatttcttacaggatggcctaagacagctgtagatgttttt

SEQ ID NO: 1641 - DNA, 249 bp, Homo sapiens
cacacactctttatttgaggcaccctggaaaatgaaaagctatctggagaaagtaatcatgtgagaagatggccttgaagatagcagcttgattttctttgaaagaaaaaagtggaccaatttacagtagtgactttgctaaaaggctgaaaagagttgagtgtattttctcttcagtctctctttttctaaaggaaacacgtcatggattgattggaaaacatgatcttctagttatcaaatgcttta

SEQ ID NO: 1642 - DNA, 278 bp, Homo sapiens
ttaaatccaagagatgacctcagatgagtgacacagggaattcaagaggaagaattggaaaggcctaggtttttttaatgcaaggtaagacacccacacaagtaaatggagaaatgtgtattatttatatcaaatcagcaaatgcttcattaaaacttagaggagcccaaggaaagttttagcaagcaagggttaggaaatgtatatgtatcattcaaagtcagttggggaaagttttaagttatacaaaatgtcacttgtaatatgcaagccagaag

SEQ ID NO: 1643 - DNA, 240 bp, Homo sapiens
aaaagtctctttctggtctttctggttttgtttatgaatttccctctgtggccacaaattcctcccctcccccatgactcacagtccatatggcccacccccagacttgagcaccaagctctgcattaatgcagttggcctgcgacaaggagctgtggacccttccccatctcttccaattcactttccccaactatccagttccagaggccgcaggcctggaaggatgcagtgcatatt

SEQ ID NO: 1644 - DNA, 245 bp, Homo sapiens
aactgataagtcatcatcataggatgttagggaaccaacttattattatgaaaacccgtaaatgaagggaaagattcaagtgtttatgctttctttcttaaacgacataccactgggtaaccaaagagtaaaggtgctgagggaatatgatagaattagaattagaattctaaactccctgtaaactgatggatctgagcattgcacatcagtggccactaacatccccaaaagagaggcagccc

SEQ ID NO: 1645 - DNA, 33 bp, Homo sapiens
aatttaatcagagaatcggccggaagcagtggc

SEQ ID NO: 1646 - DNA, 296 bp, Homo sapiens
aggaacccactaaatactccgtcacctccatgtcccctttacagtgttaaattattacataagcaggtgaaaggtagaaggcgaattatgtgagtaaatatggtctgttttcttttcagcaaaaatgactatttttgtgtgtgactaatttatttttattattgtaaagatacaataaaccggttgaaatatttgctttgttgacaagcgtgtgctttttttggccttattcgcgttttgttttcctgcaaatagcgccctttaaaaagaagagtcagacaataaactggttgaaa

SEQ ID NO: 1647 - DNA, 261 bp, Homo sapiens
caaaccaatactgcgtggcccaagacctcagcataaaaaaacactcttatcaggtggcatattccaagggcttagaggttctctctcaggagctggtcaagggcctgtctttggcatgtgcagggtttgagcaactcaggcctgctgtgcacatatattcattaataaacggaatacactcatgtacttcaagatctaaaatttaatctccaagtcagggttgtggaagacttacacaaatcccagttgaaactcattctc

SEQ ID NO: 1648 - DNA, 232 bp, Homo sapiens
tttatggctctaaagcttgtgatttttccccggtatgttgcctttttcctttcaggacctgtgagggcttagcggtgagtttggctacaaacttttggtcaaagaataaaatgcatttttgctacaaatgcaatgatgtatgacaggtacaatgtagaactgatgtagagctttgctcctaggttcaggtaaaaccaggtttttgtcccaccaccaggaatgattaggaaca

SEQ ID NO: 1649 - DNA, 281 bp, Homo sapiens
gggagttagattagaattgcccagtttttgtgtgtgtaggtttgctttgggatgagatgtccagcagaaaatcacaatggaaataattgatttaaagacactaaataaaaatgtatttatttaataattataaataaaattagaagatgaaaagcaaacgaaaacaaggtcctaacttgacaaaataagggctaacaatgttaatgaagaaagagcttttaaaaatcatttcaaaacatggccgggcacgggtggctcgcggagcgagtctcacagagcga

SEQ ID NO: 1650 - DNA, 229 bp, Homo sapiens
ctcatgtttgtaatgctggtagcactttgggatgctgaggcaggcagatcacgtgagcccaggagttcgagaccagccctgggtgaaacccgtctttacaaaaaaaataataataattgaaaaatagaaaaaatgttagctaggcatggtggtgtgtgcctatattcccagctactgaagaggctagggtgggaggattacctaaacacagggaggctgacgctgcagt

SEQ ID NO: 1651 - DNA, 145 bp, Homo sapiens
actggaggggtcatccttgcccatcgggaccagaaacctgggagagacttggatgaggagtggttgggctgtgcctgggcctagcacggacatggtctgtcctgacagcactcctcggcaggcatggctggtgcctgaagacccc

SEQ ID NO: 1652 - DNA, 97 bp, Homo sapiens; identical to SEQ ID NO: 13

SEQ ID NO: 1653 - DNA, 120 bp, Homo sapiens
ggcctgaggcaagccatggagtgagacccaggagccggacacttctcaggaaatggcttttcccaacccccagcccccacccggtggttcttcctgttctgtgactgtgtatagtgccac

SEQ ID NO: 1654 - DNA, 187 bp, Homo sapiens
ggcacagcgcctgttggaacaggtggctgtgttcctgctttggcccccgtgcggctgggcctccgcccctgcaccagtcacatgcactggacgagggccgaaactcctgtctgctatcgagccctggtgctatgtggccccggagccacagcacaatcatctcagtggcgaagcacaccacttgatt

SEQ ID NO: 1655 - DNA, 277 bp, Homo sapiens
gttcagaaagaacggataggtgcctttcgtcataaattgcaagtagcacttggatccaaaaactctgtacattaaatttatttaaatattcaattagcaaaggagaaactttctcaatttaaaaagttctatggcaaatttaagttttccataaaggtgttataatttgtttattcatatttgtaaatgattatattctatcacaattacatctcttctaggaaaatgtgtctccttatttcaggcctatttttgacaattgacttaattttaccca

SEQ ID NO: 1656 - DNA, 185 bp, Homo sapiens
ctgcagtcagcaacttggaatattcagacttcagaccagcatcacagattataaccctccgtaaatcatctgcatcccagctcccatcaaaagccagcctgaaggacccatggacacgtgactccagtgttctcaacaacatcttaagatcaagttggtttgcacaacatttgcatctacttggg

SEQ ID NO: 1657 - DNA, 243 bp, Homo sapiens
  misc_feature (151)..(152): n is a, c, g, or t
gtcccaaaggtggaatacaaccagaggtctcatctctgaactttcttgcgtactgattacatgagtctttggagtcggggatggaggaggttctgcccctgtgaggtgttatacatgaccatcaaagtcctacgtcaagctagctttgcanngtggcagtaccgtagccaatgagatttatccgagacgcgattattgctaattggaaattttcccaataccccaccgtgatgacttgaaata

SEQ ID NO: 1658 - DNA, 118 bp, Homo sapiens
gctgaggcaagcggatcacttaatgtcaggagttcaagaccagcctggccaacatggtgaaaccccgtctttactaaaaataaaaaaactagctgggcgtggtagtacatgcctataa

SEQ ID NO: 1659 - DNA, 235 bp, Homo sapiens
gaagatcagttcaagaaggtaatccaagggcctgatgacttttttggtaaccagaccccaatcaaataaggggaggagatgaaaatggaatgattttttccatgccacctgtgcctttaggaactgcccagaagaaaatccaaggctttagccaggagcggaaactgactaccatgtaattatcaaagtaaaattgggcattccatgctatttttaatacctggattgctgattt

SEQ ID NO: 1660 - DNA, 185 bp, Homo sapiens
aacgtagagagaccccatatctataaaaatttaaaatgttagccaaatgtggtggtacatacctgtagtctcacctccttgggaggctgagtgaggcaggaggattgcttgagcccaacagtcagaggctgcagtgagctatgattgcaccactgcattccagccttggttgacaaagcaagagc

SEQ ID NO: 1661 - DNA, 241 bp, Homo sapiens
gctctcttcagtggctgaatgtccagcagagctatttccttccacagggggccttgcagggaagggtccaggacttgacatcttaagatgcgtcttgtccccttgggccagtcatttcccctctctgagcctcggtgtcttcaacctgtgaaatgggatcataatcactgccttacctccctcacggttgttgtgaggactgagtgtgtggaagtttttcataaactttggatgctagtgt

SEQ ID NO: 1662 - DNA, 179 bp, Homo sapiens
caccctgcagcatcaaggttgctatggactctcctgccgggcaactcttgcgtaatcatgactatctctaggattctggcaccacttccttccctggccccttaagcctagctgtgtatcggcacccccaccccactagagtactccctctcacttgcggtttccttatactccacccc

SEQ ID NO: 1663 - DNA, 297 bp, Homo sapiens
aatatttactctagtgaagtggtttgagcactaaccttgtacacattgttaagaggcttagattggtattcatacttatttaccatacaaaagtatggtaccttaaagcttttgctctatgttctttactgtttcactggaaagtgtcaatagagttgcctaagaataaaaattgaaatggtgttaatctgaaaattaatgattctctgtaagcactgtagttgaaaagagagtagcaattaggatgatcattttgtgtaaaattcattaaaatagaaggctgctattttttgcaag

SEQ ID NO: 1664 - DNA, 173 bp, Homo sapiens
gtgtcctctttaatgcctaaagctgtgcctagaaatttcatctgttttaaaagtaaaatatacttcatgctgtttatgctattagtttctgtactgctattctatatttattatttttaaatatatgacatgtttactacttaaacatgaattcatggtatcctggttatttt

SEQ ID NO: 1665 - DNA, 250 bp, Homo sapiens
tgttttataccttatttcgttacatcatatatttgtaatgtgtaatatgaaatcttttgctttaatgtctttttttaaaatgtagaatgttttaaacttgaaaggcaattgaatgtagtatgatgaaaatgtgaatgttttgctgctttcatgaccaaagatacagggctagtggacatttagaataataattaaagctagagtcttgtatgtcttttctttgaaggagttctaaccttgtaaattgaga

SEQ ID NO: 1666 - DNA, 40 bp, Homo sapiens
tactgttctgtaccttcctgtttaaggtcacgcctataat

SEQ ID NO: 1667 - DNA, 283 bp, Homo sapiens
ttcattcatacgatgtgtgaaatttgcttaaaagggaattttcatgatttgatttagattagtatttaaatatttgctttagatagcaattaattttattgtaaaaataaggaaaaatatgtgaatatgtgaattttttaagcctgagagatgatagaatgttcccatatttttcttgtaaagaaaataatattttaacttacacatcctgtagaaaataccaccttttccccttgtattacagtacaatgtttacattactatactgtcaagctgaaagtat

SEQ ID NO: 1668 - DNA, 270 bp, Homo sapiens
tactgttctgtaccttcctgtttaaggtcacgcctataatcctagcactttgggaggccaaggtgggtgtatgacttgagcccaggaattcgagaccagcctgggcaacaaggcaaaaccctctttttacaaaaaaatacaaaaattagccaggtgcggtggtatgtgcctgtactcccagctacttgggaggctgaggtgggaggatggcctgagcccaggaggtggaggttgcagtgaactgagatcatgccgctgctactgcactcc

SEQ ID NO: 1669 - DNA, 219 bp, Homo sapiens
gagagatgtcttgagggtcactaccaaagaattaccctcattgtccctcactcaggccatgtgtacatgcgatgctgctgagtgtgctggggtgggtggtggccacgtggctcccccagagcacttcctaactggcaagctgggagacccattactggtgaactttgtggaaattagaactgtatcttttacataatcttggcatattacatttcataa

SEQ ID NO: 1670 - DNA, 287 bp, Homo sapiens
gctcttgtatatgatcagatttggcacaggtttttagaatagcgtgtatacaagtagagggatctctttttttctttttattgtaaattgacaattacatatgacataaatgtatggggtacaaagtaatgttataatctataaatacagtgtggaataattaagtcaaactagttaacatactcatcaccccaaatgcttaacattttttgtggtgagaacatttgaaatgtactctctcagcaattttgaaacatacagtactctgttaactattcaccatgctg

SEQ ID NO: 1671 - DNA, 227 bp, Homo sapiens
attgaatgtatataagtggcaaaactagatttttaaggaagtgtacattataatattggagctcagtactgcatgaagagacttcattaaaactaagaaaacatttatttggggagaaattttaggcatttaagaacttgtatttttttattttaaaaagttaaattattccgtaatttggaagaagtttcgttgaatgtaggacataaccgtttgaagggttttca

SEQ ID NO: 1672 - DNA, 297 bp, Homo sapiens
ctcgatcggtcagaatgtgtggcaattctgatctgcattttcagaagaggacaatcaattgaaactaagtaggggtttcttcttttggcaagacttgtactctctcacctggcctgtttcatttatttgtattatctgcctggtccctgaggcgtctgggtctctcctctcccttgcaggtttgggtttgaagctgaggaactacaaagttgatgatttcttttttatctttatgcctgcaattttacctagctaccactaggtggatagtaaatttatacttatgtttccctccaa

SEQ ID NO: 1673 - DNA, 169 bp, Homo sapiens
tctctcgatcggtcagaatgtgtggcaattctgatctgcattttcagaagaggacaatcaattgaaactaagtaggggtttcttcttttggcaagacttgtactctctcacctggcctgtttcatttatttgtattatctgcctggtccctgaggcgtctgggtctctc

SEQ ID NO: 1674 - DNA, 221 bp, Homo sapiens
gaccatgtctccaaaacatacatatatataaaatatatttaaagacctcttggagttcaggcagaagtgaagatagcactatgaagtagtttccacattaacaatagcaatgactttgaacgatgtgttccccctttcttcttgatattaatatctggttcattttgcaaacatttgaaagatttatggaaagcttattgaccccagatcacaattattat

SEQ ID NO: 1675 - DNA, 108 bp, Homo sapiens
tcccttgcaggtttgggtttgaagctgaggaactacaaagttgatgatttcttttttatctttatgcctgcaattttacctagctaccactaggtggatagtaaattt

SEQ ID NO: 1676 - DNA, 181 bp, Homo sapiens
aaatatatttaaagacctcttggagttcaggcagaagtgaagatagcactatgaagtagtttccacattaacaatagcaatgactttgaacgatgtgttccccctttcttcttgatattaatatctggttcattttgcaaacatttgaaagatttatggaaagcttattgaccccagatca

SEQ ID NO: 1677 - DNA, 187 bp, Homo sapiens
ttatttgtggtgtggtttcttgttttgttttgttaatgtgggatgggcctgtaaggtggcctaagacactaccaatttatgagtttggctaagggactggaaaggagaagagtgcctttgcagaaagcaggagctggaacaaacacttatgtttaatattgctcctttacaggtcgccagcaaaaga

SEQ ID NO: 1678 - DNA, 238 bp, Homo sapiens
acactcactgagctccgtgtagacaatcagcgccagtggcctggtgatgcagtggagatggagatggccaccgtgctagagcagtgtccctctattgtccgctttggctaccactttacacagcaggggccacgagctcgggcagcccaggccatgacccgaaacaatgaactacgtcgccagcaaaagaagagataacactgcatttccctttaccaactagcgctgggagcactgg

SEQ ID NO: 1679 - DNA, 150 bp, Homo sapiens
gtgggatgggcctgtaaggtggcctaagacactaccaatttatgagtttggctaagggactggaaaggagaagagtgcctttgcagaaagcaggagctggaacaaacacttatgtttaatattgctcctttacaggtcgccagcaaaaga

SEQ ID NO: 1680 - DNA, 155 bp, Homo sapiens
agagatgtctagtcctcagaaacttctttcctgccctgattggggctcttgctgttccgtttcttctccctgcttctcccctttgtcatctctgatctttgcctaatctgtttctttttccttttcccctagttcttacaggtttcgttgtgttt

SEQ ID NO: 1681 - DNA, 164 bp, Homo sapiens
agcacaaggtgtgcatggacctgagggccaacctgaagcaggtcaagaaggaggacacagagaaggagcgggacctgcgagacgtgggtgactggaggaagaacatcgaggagaagtctggcatggagggccggaagaagatgtttgagtccgagtcctaggcc

SEQ ID NO: 1682 - DNA, 107 bp, Homo sapiens
ctacgcctgccccggtgcccggctcccagcagaacatactagggagatgcacccagagcctgccagggagggctggcctcaccaccaccgtcaataaaggatttgaa

SEQ ID NO: 1683 - DNA, 247 bp, Homo sapiens
acacctgcaagtcctggtttatattggacccctccctccgagctgcagttcacctttgaccttgcctcacctttcaccccccaccccccacagcgtcagctcctacctttgaccccagcttctctttgattcccacaggccccatgcatcctccctgcctcactcccctcagcccctgccgaccttagcttatctgggagagaaacaaggcctggtgcctgtgaggaagagaggtcacccctaccct

SEQ ID NO: 1684 - DNA, 259 bp, Homo sapiens
tatgcggccggatggtcacctgaaaagcaggcccagcacctgcccctcagggtgacagaactggttcagcagctgacaggccaggcacctgctcctgggcagcgggtgttggtgctagagctgagctgtgagggtgacgacgaggacactgccttcccacctttgcactatgagctgtgacaaggcagccaccctgtcacctagctcaatggagccccggatcccaagccctgcattgtaagcccacagtaggcactca

SEQ ID NO: 1685 - DNA, 112 bp, Homo sapiens
atttgggtgggatgggtaggatgaagtatattgcccaactctatgtttctttgattttaacacaattaattaagtgacatgatttttactaatgtattactgagactagtaa

SEQ ID NO: 1686 - DNA, 178 bp, Homo sapiens
tggcgtggcgtgcccgtccccagggctggctggtgccccacgcggggcctgtcatgtgaagctcgtgtcctgactttgttttaagtgcattcacgcacttactcttggccttatgtacacagccttgcccggccgccggggcacataggggttttatcgggcgtgaatgtaaataaat

SEQ ID NO: 1687 - DNA, 224 bp, Homo sapiens
  misc_feature (64)..(64): n is a, c, g, or t
ctcttgctgtatcttctatgcaattccttttctaaaaaaaccccccggcagaggcagagtgccntccggatatctgtccggcgccttgctgagtggtggaggtgagggataccagctccgggtgtgcctcttttctctccctggctgccaatcctgattttccctgcagtccccttggtttgtaaattgcctgcatttattctgtcagccaacatgtacaaaat

SEQ ID NO: 1688 - DNA, 259 bp, Homo sapiens
ggctaagccttatcaaggatttctttcaaatgtctttagtgaagccattcctgcctcacagagggaggaggctgggcattcctttctcaatactttcagagcagtttgtccatacccctaatatagtgcttgtctcatttcaattatattcactcgtaaaatttgtgtttcatgccagtgagttccatgagatcaagaattctattgtacttaattttatatctctcctgcttagcacaatacctagagtatcacagat

SEQ ID NO: 1689 - DNA, 134 bp, Homo sapiens
gcaaggcagactgatccatcctgtaccgcatttggcagcttcaactcgctgggaggtcaccttattgttcccaattcaggagtcagcttgctgattcccgctggggccattccccaagggagagtctacgaaat

SEQ ID NO: 1690 - DNA, 35 bp, Homo sapiens
aaaaagaagaagaggccaggcgtggaggctcatgc

SEQ ID NO: 1691 - DNA, 240 bp, Homo sapiens
tgaggataggaccaatcttttccaaagcaaccaaatataataaggaagaagtttgaagactattttaatttcttcccatccttcattggaaccaacacctccctagaaatctagcttaatttcaaatcatcacctcctcacaaaatattctgatttgacgttatccacgttcaagtatttaccaaaaagaaaacataattttatctacaaggtaagcccaacctcacttaaatttaggaa

SEQ ID NO: 1692 - DNA, 298 bp, Homo sapiens
actgtccatggctcgttctatttttgttcaaatcatttgaagttgaagctgtggacggtttgttgtgtctatttcagattagtaatttacagagaaatcacagacttttgctacaaatcgtgtgcatcaagtgtctcagataatcctcccatcagtgttctgtttctagaacttgtagaaccagtgttactgtttgtatcagggaagtggagaatctaagtgtaaaaaagaaataactaagactcctattccttggagggacccttctggtgccctttgggaataaagctgtagcact

SEQ ID NO: 1693 - DNA, 276 bp, Homo sapiens
tgaggataggaccaatcttttccaaagcaaccaaatataataaggaagaagtttgaagactattttaatttcttcccatccttcattggaaccaacacctccctagaaatctagcttaatttcaaatcatcacctcctcacaaaatattctgatttgacgttatccacgttcaagtatttaccaaaaagaaaacataattttatctacaaggtaagcccaacctcacttaaatttaggaaaaacccaagaaacaaaaacatgacccacttaaccca

SEQ ID NO: 1694 - DNA, 250 bp, Homo sapiens
gaaatccatattttaaagaaacagctttcaagtgcctttttgcagtttttcaggagcgcaagatagatttggaataggaataagctttagtttttaacaaccgacactcctacaagatttagaaaaaagtttacaacataatttagtttacagaaaaattttgtgctagaatactttttaaaaggtattttgaataccattaaaactgcttttttttttccagcaagtatccaaccaacttggttttgct

SEQ ID NO: 1695 - DNA, 273 bp, Homo sapiens
gaaatccatatcttaaagaaacagctttcaagtgcctttctgcagtttttcaggagcgcaagatagatttggaataggaataagctctagttcttaacaaccgacactcctacaagatttagaaaaaagtttacaacataatctagtttacagaaaaatcttgtgctagaatactttttaaaaggtattttgaataccattaaaactgcttttttttttccagcaagtatccaaccaacttggttctgcttcaataaatctttggaaaaactc

SEQ ID NO: 1696 - DNA, 288 bp, Homo sapiens
gcgatatattacccaggcaagaataaaaaagaaatcccatatcttaaagaaacagctttcaagtgcctttctgcagtttttcaggagcgcaagatagatttggaataggaataagctctagttcttaacaaccgacactcctacaagatttagaaaaaagtttacaacataatctagtttacagaaaaatcttgtgctagaatactttttaaaaggtattttgaataccattaaaactgcttttttttttccagcaagtatccaaccaacttggttctgcttcaataa

SEQ ID NO: 1697 - DNA, 266 bp, Homo sapiens
ctaacttttgtgtatcgtaaccagccagatcctcttggttatttgtttaccacttgtattattaatgccattatccctgaattccccttgccaccccaccctccctggagtgtggctgaggaggcctccatctcatgtatcatctggataggagcctgctggtcacagcctcctctgtctgcccttcaccccagtggccactcagcttcctacccacacctttgccagaagatcccctcaggactgcaacaggcttgtgcaacaat

SEQ ID NO: 1698 - DNA, 270 bp, Homo sapiens
cagttaaaagaatccctgcaggctgggcgtggtggctcaaacctgtaatcctaggactttgggaggccgaggtgggcggatcacaaggtcaagagatggagaccatcttggccaacatggtgaaaccccatctttactaaaaatacaaaaattagccaggcgtggtggcacatgcctatagtcccagctactggggaggctgaggcaggagaatcgcttgaacccagaaggcagaggttgcagtgagccacgactgcaccactgtacttc

SEQ ID NO: 1699 - DNA, 40 bp, Homo sapiens
gcaactgcactgcagtcaggggaatagagccgggccctgt

SEQ ID NO: 1700 - DNA, 262 bp, Homo sapiens
cctggccacaattcaaattaaggcaacaaacatataccttccatgaagcacacacagacttttgaaagcaaggacaatgactgcttgaattgaggccttgaggaatgaagctttgaaggaaaagaatactttgtttccagcccccttcccacactcttcatgtgttaaccactgccttcctggaccttggagccacggtgactgtattacatgttgttatagaaaactgattttagagttctgatcgttcaagagaatgatt

SEQ ID NO: 1701 - DNA, 267 bp, Homo sapiens
aatccccacacttttggagaccaaaatgggaggatcacttgaggctaggagtttgagaccagcctgggcaacatagtgagaacttgtctttacaaattttttgttttttaattagctgggtggtgtgcacctgtagtcccagctacttgggggaggtgtggtggaaggattgcttgagtgtgggaggccaaggctgcagtgacccaccatcgcaccactgcactccagcatgggcaacaaaatgaggctgtcgccacccccaaccta

SEQ ID NO: 1702 - DNA, 294 bp, Homo sapiens
ttagaaaacattcataaggctgggtgtggtggctcatgcctataatcctaatactttagaggccaaggtgggaggattgcttgatgccaggagtttgagaccagcttgggccacatagtgaaaccctgtctttacatgaaataaaattagctgagtgtcgtggcacatgtctgtagttccagctactcaagaggctaaagcgagaggattgcttgagcctaggagttcaaggctacagtgagatatgactgtgcaactgcactgcagtcaggggaatagagccgggccctgttt

SEQ ID NO: 1703 - DNA, 297 bp, Homo sapiens
gccaaagcaacaggggatatcaaaggacagaatctgagatcaaaaggcggagtcacctacagctgctgaactcaaagtcttctctgtgtgtctcttctttttttgccatcagctgggcacttctgcttcttgccccttacctgatgctaaaataatgtgactcggccacaaaaaagcatgcaaagtcatcgttacaacagggatctacagaactattttgccaccagatatgacctagttttatatttctgggaggaagtgaattcatatctagaagtctggagtgagcaaacaaga

SEQ ID NO: 1704 - DNA, 275 bp, Homo sapiens
aagggcctggtgctgcacctcagtgcccacttccgtgagcgagacagcacccgggcccggctctcacccgacggcgtggcacccacctgcccgctctgtgggaagaccttctcgtgcacatacacactgaagaggcacgagcggacacactcggtgcacactcgagagaagccgcatgcctgccggtggtgtgagcgccgtttcacgcagtccggggacctctaccgccacgtccgcaagtttcactgtggcctcgtcaagtcccttctggtgtg

SEQ ID NO: 1705 - DNA, 288 bp, Homo sapiens
attttataactgacacagttgggacaaaatatatacgtgtacatatatttaagacactaattgtgtgggagagtttagtagaggcctgtgcagacacaaggcaaacagcgtcagcagcgtgggggtttcctgggccagctcggcacctgtgggtgctttgaccctgggggtggggacagctccgtgctaaccccagcagacagttgttggtgcacagtgtttaggaggcgtgggaatgggtgctgttttcctcttttcacatcatggcgacagtaataaagcccacct

SEQ ID NO: 1706 - DNA, 295 bp, Homo sapiens
tatgaagacccatactggaaggaagagttaccaatgtgagtattgtgaatacagcactacagatgcatctggctttaaacgacatgtgatatcaatacatacaaaagactatccacacaggtgtgaattctgcaacaagggattccgaagaccatcagaaaaaaatcagcatattatgaagcaccacaaagaggctcttatgtaataagatcaatataaagaaagaagctatttaggagatatgatatgctacttgggagaaaactctcactaactgtctcaccgggtttcaaag

SEQ ID NO: 1707 - DNA, 184 bp, Homo sapiens
ttcaaataatgttcacctttctgtttttgcaccagataagaatcagttccttgagaataaattttttatctttcttaacttcagaatattaaatttggaatatctactaaaattgtgtgttatgtggctgtaaatgatgtacacgctgtaaaataagatcgctactgttatgtgggattattat

SEQ ID NO: 1708 - DNA, 152 bp, Homo sapiens
ctccacgtcagtgccatcggtctagaaccactaaccccgcattgctgttgatcgtcacgctcgcatctatagataacggctctccagacctgagctttccgcgtcagcaagtaggaatcgtttttgctgcagagaataaaaggaccacgtgc

SEQ ID NO: 1709 - DNA, 42 bp, Homo sapiens
gctggctcttttgacagcctttggcgtctgtagaataaatgc

SEQ ID NO: 1710 - DNA, 289 bp, Homo sapiens
ggagcagtcctatgtttcagtgccccttaaatttttgccctgagccctccacgtcagtgccatcggtctagaaccactaaccccgcattgctgttgatcgtcacgctcgcatctatagataacggctctccagacctgagctttccgcgtcagcaagtaggaatcgtttttgctgcagagaataaaaggaccacgtgcaatacttaatgccgcatgatctctatccctcttcccaataggggctggctcttttgacagcctttggcgtctgtagaataaatgctgtggc

SEQ ID NO: 1711 - DNA, 169 bp, Homo sapiens
atggaagagcattcaccacatgtgttctgttttgggttgacatttagcttttgtttttattttagaaacggaagactctggtagcagtccttgaaatcttgatgccattgctattttctgcattgtattgtatcttcgttttagtagtgctccaataaaaagacctgct

SEQ ID NO: 1712 - DNA, 203 bp, Homo sapiens
gtccctctggtgatcatcatgttaagcctcacattcttcaacttcaaagaaagaagcatagaaaatgtcccattggagctgactctgaaaacatatggtcagaccattgttcctttctttatttctcagaattccaggctggatcctcaactttcagaacgctttgcaaatatgtttatggttgagggacagattcctctgga

SEQ ID NO: 1713 - DNA, 214 bp, Homo sapiens
gctctgcagaacttcgggtagagtttggatgggtgcgtggaggtttccacacatgtgtgcagatcccttggaaagcaggatagagccagaaacagagaggagggtgcccgtaggccgctgggggctggctcccatggtcacatgcaagagtgaagcttcatggagaccatgattctaaactcacacctggcctcacaggtggtaatgtcactgt

SEQ ID NO: 1714 - DNA, 282 bp, Homo sapiens
gggatcttgatagatgttctaaccaaggcattgaggattatggtgtttccataacaactttgaatgaggtgtttctgaaattagaaggaaaatcaactattgatgaatcagatattggaatttggggacaattacaaactgatggggcaaaagatataggaagccttgttgagctggaacaagttttgtcttccttccacgaaacaaggaaaacaatcagtggcgtggcgctctggaggcagcaggtctgtgcaatagcaaaagttcgcttcctaaagttaa

SEQ ID NO: 1715 - DNA, 204 bp, Homo sapiens
gttttcttatgatgcaagggcatacttttatgcaaataattaaaacttcataggttttaatttcccatatctctatatattattatgacctatccaactggtaaccctatgaacaccttaaaataaacttgtatacttttatttaggtgagtttttcttgttaatactattattattgctatctaattgaatacttgaaggaag

SEQ ID NO: 1716 - DNA, 33 bp, Homo sapiens
ggaacaccacaccctggggcctgttggggggat

SEQ ID NO: 1717 - DNA, 239 bp, Homo sapiens
caggctatcacagcctgctccgatggcatgattattaggagctcatctgcatcactggtgaatttctttggtcacttctggacagtttttaaacataagtccatgcccttctttgttctgctgatgaggcacgtcataaaataaatgtccagcaatgtcttcccgtcttgttctcaggcctcaggctctcggactccttcccccaaccctgcccccatgttaactttctattgctgctg

SEQ ID NO: 1718 - DNA, 120 bp, Homo sapiens
gctacaggaggacattcaaaccaaaggcaaagaagttgaaaactttgaaaaaaatttagaagaatgtataactagaataaccaatacagagaagtgcttaaaggagctgatagagctgaa

SEQ ID NO: 1719 - DNA, 210 bp, Homo sapiens
  misc_feature (131)..(131): n is a, c, g, or t
taaattaagacaccctattgacttccgggtaaggggagtcaattgattacccagcagcacagtatttgctttttataattccctttttaaatacttgttcttaattcactggttttccttttctgtcattnttcagagtttagattgtgagtccatgttttgtctgttgtgcctataaaggaaatttgaaatctgtatcattctactata

SEQ ID NO: 1720 - DNA, 252 bp, Homo sapiens; identical to SEQ ID NO: 924

SEQ ID NO: 1721 - DNA, 269 bp, Homo sapiens; identical to SEQ ID NO: 925

SEQ ID NO: 1722 - DNA, 95 bp, Homo sapiens
cttctgcccttgatcccatcgctttgatccccagttctgggcaagggttagacaccaccttgtgtctttaacgtgttctagatgtggaagcgttt

SEQ ID NO: 1723 - DNA, 78 bp, Homo sapiens
acgcgccgtcctccgaggaactgggcgcttgcagtgcgttgcacaccctcacctcccacccactgattattaataaag

SEQ ID NO: 1724 - DNA, 177 bp, Homo sapiens
ctcatgtgccagttcggtctgcctgcagaggctgtggaggccgccaacaagggcgatgtggaagcgtttgccaaagccatgcagaacaacgccaagcccgagcagaaagagggcgacacgaaggacaagaaggacgaagaggaggacatgagcctggactgagccacgcgccgtcct

SEQ ID NO: 1725 - DNA, 241 bp, Homo sapiens; identical to SEQ ID NO: 485

SEQ ID NO: 1726 - DNA, 269 bp, Homo sapiens; identical to SEQ ID NO: 486

SEQ ID NO: 1727 - DNA, 116 bp, Homo sapiens; identical to SEQ ID NO: 487

SEQ ID NO: 1728 - DNA, 181 bp, Homo sapiens; identical to SEQ ID NO: 55

SEQ ID NO: 1729 - DNA, 263 bp, Homo sapiens; identical to SEQ ID NO: 489

SEQ ID NO: 1730 - DNA, 263 bp, Homo sapiens; identical to SEQ ID NO: 489

SEQ ID NO: 1731 - DNA, 166 bp, Homo sapiens
gagaggaggaaacgtgtatacctgtaacatctggtggctcttcccccagaagtttgtgttcatacataattgttttccacgctggatcataatgtgacgtgcagttttgccctgtgctggggagccacatgaagcttcccctggctaacttgctaccccgcagcaa

SEQ ID NO: 1732 - DNA, 32 bp, Homo sapiens
ctgtgctcatctgtattgatgtccttggagtt

SEQ ID NO: 1733 - DNA, 262 bp, Homo sapiens
gtgacccatgaccttgccgcatgaggcctgagggcatggtgtccagagtcccagagcagatcaggccccaaagtcctgctggaccccccagccaccgtgagctcctccgtgtggctagggagctgctgtccagaggcggaggtaaacattgatccctcctgcacactcagctctctcatggaagtcggagccctcagggtcacctgaaaactctgacactacctttgccattcacctgtcccgtctccaacattaaagcttt

SEQ ID NO: 1734 - DNA, 177 bp, Homo sapiens; identical to SEQ ID NO: 931

SEQ ID NO: 1735 - DNA, 162 bp, Homo sapiens; identical to SEQ ID NO: 932
  misc_feature (40)..(40): n is a, c, g, or t
  misc_feature (45)..(45): n is a, c, g, or t
  misc_feature (64)..(64): n is a, c, g, or t
  misc_feature (67)..(67): n is a, c, g, or t
  misc_feature (69)..(69): n is a, c, g, or t
  misc_feature (71)..(71): n is a, c, g, or t
  misc_feature (122)..(122): n is a, c, g, or t
  misc_feature (133)..(133): n is a, c, g, or t

SEQ ID NO: 1736 - DNA, 143 bp, Homo sapiens; identical to SEQ ID NO: 933

SEQ ID NO: 1737 - DNA, 243 bp, Homo sapiens; identical to SEQ ID NO: 934

SEQ ID NO: 1738 - DNA, 212 bp, Homo sapiens; identical to SEQ ID NO: 935

SEQ ID NO: 1739 - DNA, 189 bp, Homo sapiens; identical to SEQ ID NO: 936

SEQ ID NO: 1740 - DNA, 154 bp, Homo sapiens; identical to SEQ ID NO: 494

SEQ ID NO: 1741 - DNA, 218 bp, Homo sapiens; identical to SEQ ID NO: 495
  misc_feature (51)..(51): n is a, c, g, or t
  misc_feature (73)..(73): n is a, c, g, or t
  misc_feature (129)..(129): n is a, c, g, or t

SEQ ID NO: 1742 - DNA, 193 bp, Homo sapiens; identical to SEQ ID NO: 947

SEQ ID NO: 1743 - DNA, 178 bp, Homo sapiens
ccccgcgcgccgtggcaccccaacaccggcagggaacctaccctcggctcccgggtctcccctccctcgccaccccaaccagcggcttctgcgccgccctccgccctccgctggctccgaggtggtgggggcgccgcacgctccatccctttccctcgctcgattccttttcccgcgc

SEQ ID NO: 1744 - DNA, 213 bp, Homo sapiens
ccaccccaaccagcggcttctgcgccgccctccgccctccgctggctccgaggtggtgggggcgccgcacgctccatccctttccctcgctcgattccttttcccgcgctccatgcctccccctcgactcccggtgctgcggaagaactgaaggttgcgatgccttactctgacgggagcatctgtatttttatgttaaaagcccacaaaata

SEQ ID NO: 1745 - DNA, 278 bp, Homo sapiens; identical to SEQ ID NO: 975

SEQ ID NO: 1746 - DNA, 141 bp, Homo sapiens; identical to SEQ ID NO: 976

SEQ ID NO: 1747 - DNA, 205 bp, Homo sapiens; identical to SEQ ID NO: 977

SEQ ID NO: 1748 - DNA, 156 bp, Homo sapiens
ttagaagcctgcgtgtgcatagagcgccccctacttcccagttaactcccagtttttctccctgagcttggtatttgtcatgtgccaactttgactttgaggtgggcagtgagggaagcagccccgggcctgcttgcttcctgtccccgaaatgtt

SEQ ID NO: 1749 - DNA, 196 bp, Homo sapiens
tcctgcagggaaccatcattgccctggtggtggtcatggccttcaggcatcacctgggagcccagcctcaggagcaaggaccacagccttgtcctagagagagggcactggatggtggctccagctctaacggtcacccttttctgtggctccagcgtggtgtccatgtccacactgtacgtgctgagcctgcgca

SEQ ID NO: 1750 - DNA, 212 bp, Homo sapiens; identical to SEQ ID NO: 982

SEQ ID NO: 1751 - DNA, 256 bp, Homo sapiens; identical to SEQ ID NO: 509

SEQ ID NO: 1752 - DNA, 146 bp, Homo sapiens
aagactccaggatgatattctgagccatatgttaattttgataaccacctagaacaataaaaggtaaacatgctaccatcttctattctcattgcaccactggattctggtacatctaaaaattgtacttaaatgatatccaagaa

SEQ ID NO: 1753 - DNA, 284 bp, Homo sapiens
tgctgggtccggacgggcggtgctaggttcggtccggacgggtggtgctgggtctaaatgggcggtgctaggctcagcaggggaccggtgggcgtggcggcacaggtacggagcgcagggccggtggagcgccctctccgaagggccctgcgctccccgcgctcgctgctcctcctgcccgcgcattgccccggggctgctgcgtgtttcttccagggtgattcctttccgctgggtcacttcaaagccgaccttttcaagctgttttcttccgcggaggacac

SEQ ID NO: 1754 - DNA, 68 bp, Homo sapiens
catgtccttctgtgggacactgccagccccagggctccagcccagcccggtggatcctctggggaagc

SEQ ID NO: 1755 - DNA, 254 bp, Homo sapiens
ttcctatatatctgtagtgcactgataattgatattgttagtgagaactttaaggcacgacaagatctggaagagcttgtgaaccatcaaagtcagattgcttatgttgagtagtgatttaacattgaacatttctgtactactctgactctttgaaaattggacatttcagaatgatacaatataggggagctctttacaagtagcatatcatttttcctgactttcctggctgactgcttaccttcatttct

SEQ ID NO: 1756 - DNA, 270 bp, Homo sapiens
tccatttaatcccttattcttataaggagtctaatttttgtgtattgtccttgattagggctgctgacagctttacaccaaagctgaagtctctcacttaatcctaagcaaggggctagggagaactaagatatccttcccatatcaagggatataggttactagaagggtggaggtctcttaacaggctcactcacctttcagagtttaaattatggtcaggcttaagaagctctctcttgtgactgagtgtattgcatagacatgtct

SEQ ID NO: 1757 - DNA, 246 bp, Homo sapiens
ctgctttgtgttagagcttgtgactgccaaaaattttgtgcacagtgatatgactgttttaggatcttaagggtagaattttgtgaaaggtgagatcctttggaattgagttctttctcattgggtatgaaaatggatgtatgtttagaatatatgcccaacgaggcaggaccatgtggatagattccatttgtttccttgacctgatgtaataaaaactgataaaagccgtgcagtgcccggcat

SEQ ID NO: 1758 - DNA, 218 bp, Homo sapiens
  misc_feature (72)..(72): n is a, c, g, or t
  misc_feature (76)..(76): n is a, c, g, or t
  misc_feature (131)..(131): n is a, c, g, or t
atatgggatctagagtacacccagggttgctatatcgaattcatgtttctagaggtcagttcaacacaatgnatgnaagtggaccaggtgtaggtaagcagggagtggtgctggatgttgcaagctggagnacatgtgccaagggtgaaggggggcaggaccactcagttactctgttgcccagtagccatgtgggtccaatgttgtcacatgacttt

SEQ ID NO: 1759 - DNA, 174 bp, Homo sapiens
tgtgcagttaatgttcactagagaatgttcaggtatcaaaattggtattaagtattaggagtaaataagaggaattttgaatgcatttatttcttagagtcaaattttgttaaactcagttcagttatttatgacattcatatattataagttaactgttaaattctgcctaat

SEQ ID NO: 1760 - DNA, 44 bp, Homo sapiens
tcttatcctacttgaaacttatagcttacaaacttcacagcctt

SEQ ID NO: 1761 - DNA, 257 bp, Homo sapiens
atttatttttactttgacagggagttttgctcttgtcacccagaatggagtacagtggcacgatcttggctcactgccacctccgtctcctgggttcaggtgattcttttgcctcagctgcctgattagctgggattacagttgcgtggtggcggttgcctgtagtcccagctactggggaggctgaggcaggagaatggcaggaacccaggaggcggagtttgcagtgatccgaagccgcgccacttcacaccagc

SEQ ID NO: 1762 - DNA, 249 bp, Homo sapiens
attacagtgatgtattttagactcacattttgtgattcaaatatgttataaaggcattcttgcaccatggtaaagaatgtgtgtggtaaatttccgtttatatgtagttggaaaaaattcactgaataatgttttaatgatagggtattatgatacaatgtaaaaaacaattggtttttcagcagtacagaaagtaaactatatatgtgctatcaggaaaccccttcatactgtgtataaaattgcaat

SEQ ID NO: 1763 - DNA, 177 bp, Homo sapiens
gtgcagttaatgttcactagagaatgttcaggtatcaaaattggtattaagtattaggagtaaataagaggaattttgaatgcatttatttcttagagtcaaattttgttaaactcagttcagttatttatgacattcatatattataagttaactgttaaattctgcctaataaag

SEQ ID NO: 1764 - DNA, 231 bp, Homo sapiens
gcctttgggtgaaactagagtgtgttctacctaacatgaaacttaatagtggagacggtgcactgggaattgagaataagaatctgttagagaggtgaagtgagtcaaagtctcttccagctgagccaacctcggaaagctttatttatgggtcaatttatgggtcaatgaagtcacatgacatggactgccttcctacaggacactcgtgcatggaagcccaatttcctc

SEQ ID NO: 1765 - DNA, 286 bp, Homo sapiens
gccatgattttagaagtggacttccagtgctacaagtatgtacactctctatgtagaaatgctaaagacatatgtggtagatgaaccatgaaagcttcagattctttttaatgattgaatagttcatggtttggtattgaaatctgcaagaacatgagacaaaaccttttaaaaaggcagtggtagaatctcagtagtgactgaaatcattttgaatttgtttacaacagtccccatatgcaatcagtttctaatccttttgactatgttccaacaatagcaaact

SEQ ID NO: 1766 - DNA, 183 bp, Homo sapiens
tggctaacatggtaaaaacccgtctttactaaaaacaaacaaaacaaacaaacaaaaaattagccgggcgtggtggcaggcgcctgtagtcccagctactcgggaggctgaggcaggagaatggcatgaacctgggaggcagagcttgcagtgagccaagatcggcgccacggcactccagcc

SEQ ID NO: 1767 - DNA, 278 bp, Homo sapiens; identical to SEQ ID NO: 524

SEQ ID NO: 1768 - DNA, 188 bp, Homo sapiens; identical to SEQ ID NO: 525

SEQ ID NO: 1769 - DNA, 271 bp, Homo sapiens; identical to SEQ ID NO: 526
  misc_feature (90)..(91): n is a, c, g, or t
  misc_feature (99)..(100): n is a, c, g, or t
  misc_feature (116)..(116): n is a, c, g, or t
  misc_feature (122)..(122): n is a, c, g, or t
  misc_feature (131)..(131): n is a, c, g, or t
  misc_feature (133)..(133): n is a, c, g, or t
  misc_feature (143)..(143): n is a, c, g, or t
  misc_feature (145)..(145): n is a, c, g, or t
  misc_feature (156)..(156): n is a, c, g, or t
  misc_feature (185)..(185): n is a, c, g, or t
  misc_feature (213)..(213): n is a, c, g, or t
  misc_feature (227)..(227): n is a, c, g, or t
  misc_feature (231)..(231): n is a, c, g, or t
  misc_feature (244)..(244): n is a, c, g, or t

SEQ ID NO: 1770 - DNA, 63 bp, Homo sapiens; identical to SEQ ID NO: 527

SEQ ID NO: 1771 - DNA, 185 bp, Homo sapiens; identical to SEQ ID NO: 528

SEQ ID NO: 1772 - DNA, 95 bp, Homo sapiens; identical to SEQ ID NO: 529

SEQ ID NO: 1773 - DNA, 232 bp, Homo sapiens; identical to SEQ ID NO: 530

SEQ ID NO: 1774 - DNA, 270 bp, Homo sapiens; identical to SEQ ID NO: 531

SEQ ID NO: 1775 - DNA, 240 bp, Homo sapiens; identical to SEQ ID NO: 532

SEQ ID NO: 1776 - DNA, 174 bp, Homo sapiens
tttggctaccaggagtttagtttattttatttaaaatttttttgccaatggtgccaagtaatgtgaatgctaatactgcttaagaaaattaagttacttttgcaaaacagataatcataagatgaatcagtatgtagcttaacaccatccactcactccaacaaagaacactta

SEQ ID NO: 1777 - DNA, 130 bp, Homo sapiens
tggtggtgggccccggtattccagctacttgggaggctgaggcaggagaatagtttgaacccaggagttggaggttgcagtgagcagagatcacgccactgcacttcagcccgaatgacaaggtgagact

SEQ ID NO: 1778 - DNA, 281 bp, Homo sapiens
gacaataatacgaacccctctctggctgcacggtcgcttatggcagttccacacagtagttggcgcccaatggggggtccctgagacttgcatgtaaaactagtctagatgtcttctttttttgtaagttttatttttgtaattgtgcatgtaaagcatcattgaatcaatggatctgttgaagaactcagctgctggaaaccatgcaaaatgttttgaattgcccttaaaatatggaaaatgttttctgaatgctttatattctttctgctgtaaattaa

SEQ ID NO: 1779 - DNA, 256 bp, Homo sapiens
gcctggggccagttcaagtttttaaagtaaatcaaaatatgtattttagctaagtttaaaacctttctgccttagccatgtgggcaactaaggagaagcagttgtgacccgctgtagaggtgggagctgttgtctctcccatcccccgcgtcccagccctgtgacatggcctttgttctctcgcaggaagtctcgggtctgaagaggaaattgagatccattttcgggataggcaggcatcatttaagatctcagt

SEQ ID NO: 1780 - DNA, 297 bp, Homo sapiens
aaacaacactgcctcctgtctctgtcctgcagacggcacccctggctcaagcaatgctctcctctcggtcaagtgtcctcccaatggctccatttgctgtgcggggttgtaaacggctccattttaagccaccagctccctccctccggccctctctgctgtctccctctcctgtgctgggggctgggaggctgaaggaagccctagcaccactgtcccctcctcgatggctactcttctccaacaagacctctcttcctctcctcaacactgatgggaatggatcggaccttgcaa

SEQ ID NO: 1781 - DNA, 279 bp, Homo sapiens
aaaaaatattaggttaggccggatgtggtggcacatgcctgtgatcccagcactttgggaggctgaggcaggaggatcacttgaagtcaggagttcgagactggcctggccaacatggcaaaaccccgtctttactaaaaatacaaaaattagccagatgtggtgacgcatgcctgtaatcccagctacttggcaggctgaggcacgagaatcacttgaacctgggaggtggaggttgcaatgagccgagatcatgcaactgcaatccaacctgggcga

SEQ ID NO: 1782 - DNA, 225 bp, Homo sapiens
ggctctgtgcacacgcctcctggtccagaggcctccgtgaccatccatgatgccactttgtcccctcagcaagctgccttttttttcctagcacctgccccagcggtggtatgttttccagtcagttaccacctgtttcatcagaatggaagctccatgagagcagggcctttgtcttgtccccttgtatttccagtgcataggacagtgctgacacagtgcaga

SEQ ID NO: 1783 - DNA, 139 bp, Homo sapiens
cctgcattaccttggtaaccatttcattttttaatttaatttcattttttaattttggtgtacaagctgtaacatttcatctttcaaagtgtaacacgctgatttcctcaaatagagatacccctttgagtgataaatt

SEQ ID NO: 1784 - DNA, 141 bp, Homo sapiens
tggtggtgggccccggtattccagctacttgggaggctgaggcaggagaatagtttgaacccaggagttggaggttgcagtgagcagagatcacgccactgcacttcagcccgaatgacaaggtgagactgtcacacacac

SEQ ID NO: 1785 - DNA, 206 bp, Homo sapiens
aaagggattatattaattgctaaatattttattcacaaaggtcaataacatggcaagataaaattatttgtatagttttgtctgaatgagcgagaaaaatgtggatgtactgtttgtatatattgtatatattaaaacagagatatgtgcatgaaatcaagaaaaaagaaatgaacaaaagcaaagcattagtggctatggtctgt

SEQ ID NO: 1786 - DNA, 225 bp, Homo sapiens
tgggcctaaagcattggcagtcactgtgttccagaacgttttaggcatggtggctgataagtacacctgtgctgagtctggttttgaatatttagctctttctctccacctcccacccaattattttgatattgccacccaattttaccttatatcagaatttggcagcaccagtttctactcagaaagttaccactcaattatagtagtttaacccatttcctg

SEQ ID NO: 1787 - DNA, 107 bp, Homo sapiens; identical to SEQ ID NO: 992

SEQ ID NO: 1788 - DNA, 246 bp, Homo sapiens; identical to SEQ ID NO: 993

SEQ ID NO: 1789 - DNA, 218 bp, Homo sapiens; identical to SEQ ID NO: 994
  misc_feature (64)..(64): n is a, c, g, or t
  misc_feature (85)..(85): n is a, c, g, or t
  misc_feature (89)..(92): n is a, c, g, or t
  misc_feature (100)..(100): n is a, c, g, or t
  misc_feature (102)..(103): n is a, c, g, or t
  misc_feature (109)..(109): n is a, c, g, or t
  misc_feature (116)..(116): n is a, c, g, or t
  misc_feature (121)..(121): n is a, c, g, or t

SEQ ID NO: 1790 - DNA, 265 bp, Homo sapiens; identical to SEQ ID NO: 995

SEQ ID NO: 1791 - DNA, 214 bp, Homo sapiens; identical to SEQ ID NO: 996

SEQ ID NO: 1792 - DNA, 260 bp, Homo sapiens; identical to SEQ ID NO: 997

SEQ ID NO: 1793 - DNA, 166 bp, Homo sapiens
ctgccctggaacatcctttgcagggcagccccacaactttaaacattgacgattccttctctgaacacaggcagctttctagaagtttcccttcctccatcctatccactgggcacaactgcaataacttctgaccttttggtgaaagctgagaactcctgactgt

SEQ ID NO: 1794 - DNA, 290 bp, Homo sapiens; identical to SEQ ID NO: 1001

SEQ ID NO: 1795 - DNA, 136 bp, Homo sapiens; identical to SEQ ID NO: 1002

SEQ ID NO: 1796 - DNA, 256 bp, Homo sapiens; identical to SEQ ID NO: 1003

SEQ ID NO: 1797 - DNA, 222 bp, Homo sapiens; identical to SEQ ID NO: 1004

SEQ ID NO: 1798 - DNA, 229 bp, Homo sapiens; identical to SEQ ID NO: 1005

SEQ ID NO: 1799 - DNA, 275 bp, Homo sapiens; identical to SEQ ID NO: 1006

SEQ ID NO: 1800 - DNA, 208 bp, Homo sapiens; identical to SEQ ID NO: 1007

SEQ ID NO: 1801 - DNA, 202 bp, Homo sapiens; identical to SEQ ID NO: 1008

SEQ ID NO: 1802 - DNA, 63 bp, Homo sapiens; identical to SEQ ID NO: 1009

SEQ ID NO: 1803 - DNA, 289 bp, Homo sapiens; identical to SEQ ID NO: 1010

SEQ ID NO: 1804 - DNA, 294 bp, Homo sapiens; identical to SEQ ID NO: 537

SEQ ID NO: 1805 - DNA, 286 bp, Homo sapiens; identical to SEQ ID NO: 538

SEQ ID NO: 1806 - DNA, 270 bp, Homo sapiens; identical to SEQ ID NO: 539

SEQ ID NO: 1807 - DNA, 282 bp, Homo sapiens; identical to SEQ ID NO: 540

SEQ ID NO: 1808 - DNA, 289 bp, Homo sapiens
aaatgccggctttcaccactgtgcagagaaagtgatacttcacttttggaaaactgttacctgagacccaggggagaatttactggccattttagttgtatcacagcagaatgaataaaagatggtgaaggctgttaattttgagtcaattttacccctgacttttggccaaaagcttacttaaaattaaggatttactaagtcatcatcagctgttttttttaatttcagccagactattaattttgagccattatgtaatatatgccataggcaattaaaacataat

SEQ ID NO: 1809 - DNA, 65 bp, Homo sapiens
ttaatttcagccagactattaattttgagccattatgtaatatatgccataggcaattaaaacat

SEQ ID NO: 1810 - DNA, 195 bp, Homo sapiens
  misc_feature (90)..(90): n is a, c, g, or t
  misc_feature (110)..(110): n is a, c, g, or t
  misc_feature (123)..(123): n is a, c, g, or t
  misc_feature (125)..(126): n is a, c, g, or t
  misc_feature (139)..(139): n is a, c, g, or t
  misc_feature (148)..(148): n is a, c, g, or t
cctcagtgttgtggcgagaggaataaaagcctccccacctcattcatgaggaacttcttagaagcacatgctctgggcaacatgccccgntagtctgagatttctcctantgctgccagaaancnncctagtacacgtntctggtctnccccaacatctcccacgttcaagctgctaccttcagtaccatttctc

SEQ ID NO: 1811 - DNA, 94 bp, Homo sapiens; identical to SEQ ID NO: 142

SEQ ID NO: 1812 - DNA, 129 bp, Homo sapiens; identical to SEQ ID NO: 113

SEQ ID NO: 1813 - DNA, 202 bp, Homo sapiens; identical to SEQ ID NO: 1019

SEQ ID NO: 1814 - DNA, 284 bp, Homo sapiens; identical to SEQ ID NO: 1020

SEQ ID NO: 1815 - DNA, 245 bp, Homo sapiens; identical to SEQ ID NO: 1021

SEQ ID NO: 1816 - DNA, 164 bp, Homo sapiens
gtctaatagacacaaggatggctttcatcggctcaggcagcatcatgatgagtatgaagatgaaattcgcatgatgtctaccggctccaagaagtccctcctaagccatgagttccaggatgaaacagacactgaagaggaaacattatattctagcaaacatt

SEQ ID NO: 1817 - DNA, 145 bp, Homo sapiens
gccgatgcagaaggattagttgagctgaggacttcaagaccagcctgagcaacatggtgagatatgtctttacaaaaagtaaaaatagaaaaattagccaggcatggtggtgcacatctgcagtccagtttactcaggaggttaa

SEQ ID NO: 1818 - DNA, 191 bp, Homo sapiens
aaatttggtcctttttccaggtgaggcccagttagaataatgtgtcccggcacttttaggcacagcaaggatgaattcaatatccccttttcacttagcaacaatgtgttacttttaccctaataggaattgggaaagcaaagttgtatgagaaacagactttgctgataaagtactcatagtccagacca

SEQ ID NO: 1819 - DNA, 170 bp, Homo sapiens
gaggcccagttagaataatgtgtcccggcacttttaggcacagcaaggatgaattcaatatccccttttcacttagcaacaatgtgttacttttaccctaataggaattgggaaagcaaagttgtatgagaaacagactttgctgataaagtactcatagtccagaccag

SEQ ID NO: 1820 - DNA, 233 bp, Homo sapiens
tacagctgtttatgtgaggtgcccaacacccattcatttcaagtgcttcagtttttggtttatttcatgcactgtgccttcaaaatgaaatttttaaaagggactttaaatgaagttgaatagtagtttttaaaagtcaatttgtaatttatgtgaaatctaactgtaatgaggtcctttttgttttttatatgtaaacagatttactaatcctgtataaaagttattttacg

SEQ ID NO: 1821 - DNA, 226 bp, Homo sapiens
taagatgtgcccaagtcatttcagaaagaaagacccttcagttttgatgcattttgctgaacacttgggtagtgagtgggatcctatccagttgaggaatgcttgcaatgctcattgaagggatttgctttgggactttgtcatcttccagaaaggaaacatattgtatatttggcccagtgtgattgattgctttatctttggtaacttttacttgaatgggatt

SEQ ID NO: 1822 - DNA, 247 bp, Homo sapiens
atgtctgtcttatcatgcaatggaaatgatgctttttgtaagtatgcatcttaccaatgatgtaacggtttaatacctttgaatgttttaataaccaagttgctgctgaacttatactaaatcaggggaccaaaaaacttgctcttatcttctcaaattgtattctatatccattaatgtatcagttatcccaaagccttcaggtggaggggtttaccaccttcctaggtcgttcaaccaggttttg

SEQ ID NO: 1823 - DNA, 300 bp, Homo sapiens
ctagttcctaaaaacaaggctgagtgtggtggcttgtgcctgtaatcccaagactttgggaggccaaggtggttggattacttaaggtcagcagtttgagaccaccctggccaacatagcgaaaccctatctctaaaaatataaaaattaactggacgtggtggtgcacgcctgtagttccagctactcgggaggctgaggcaggaaaagctcttgaacctgggaggcagaggttgcagtgagccgagatcatgccactgtatgctactctgggcaacagagtgagtgggactccatttc

SEQ ID NO: 1824 - DNA, 118 bp, Homo sapiens
ggagtatgcagagaacatcggggacggccggagcccggagttccgggagaacgagcaaaagcgcatcctgggcttgctggagaacttctagaggcaccttggccctgcgcatcatgga

SEQ ID NO: 1825 - DNA, 300 bp, Homo sapiens; identical to SEQ ID NO: 1060
  misc_feature (161)..(161): n is a, c, g, or t
  misc_feature (170)..(174): n is a, c, g, or t

SEQ ID NO: 1826 - DNA, 189 bp, Homo sapiens; identical to SEQ ID NO: 1061

SEQ ID NO: 1827 - DNA, 285 bp, Homo sapiens; identical to SEQ ID NO: 1062

SEQ ID NO: 1828 - DNA, 270 bp, Homo sapiens; identical to SEQ ID NO: 1063

SEQ ID NO: 1829 - DNA, 178 bp, Homo sapiens; identical to SEQ ID NO: 1064

SEQ ID NO: 1830 - DNA, 225 bp, Homo sapiens; identical to SEQ ID NO: 1065

SEQ ID NO: 1831 - DNA, 244 bp, Homo sapiens; identical to SEQ ID NO: 1070

SEQ ID NO: 1832 - DNA, 227 bp, Homo sapiens; identical to SEQ ID NO: 1071

SEQ ID NO: 1833 - DNA, 131 bp, Homo sapiens; identical to SEQ ID NO: 1072

SEQ ID NO: 1834 - DNA, 168 bp, Homo sapiens; identical to SEQ ID NO: 1073

SEQ ID NO: 1835 - DNA, 124 bp, Homo sapiens; identical to SEQ ID NO: 158

SEQ ID NO: 1836 - DNA, 268 bp, Homo sapiens
ctgtgtccatagaaaaactgtgctggtatttgctggacaaagggttgggccccttttatttttacctgccacccagcatctcccccacctgccccttttgggtgacacagccggtaaacggaatcacgtatggttctttctgtgggtctgtggcacagcaggaagagcccggtgccgccagcaccttgtggaagaccacacatgggtggtcccacagcatgggaccaggctggcctgagggatgcccagttgtaacaatgctgctgtc

SEQ ID NO: 1837 - DNA, 186 bp, Homo sapiens
cacaggtgggccgagacccagacgaggagtgaggaatgagagagaccaaagttcctgcctccgctgggctcacattcagatgtgagctatccagtgtggtggccactagccaaacatggccagtcaaagttaaattaactaaatatgcatttcctcgttgtactgtctacattggacagggctgtt

SEQ ID NO: 1838 - DNA, 62 bp, Homo sapiens; identical to SEQ ID NO: 554

SEQ ID NO: 1839 - DNA, 38 bp, Homo sapiens; identical to SEQ ID NO: 555

SEQ ID NO: 1840 - DNA, 178 bp, Homo sapiens; identical to SEQ ID NO: 556

SEQ ID NO: 1841 - DNA, 213 bp, Homo sapiens
ctgccggtaaactggaatgtctcatgaatgaagatttcacgacaatggcacatcagaacatcctaaagcatgaagactggtttattcctgcgtgacttcagttcccactcccagtggcacatggagctaattctggttgatctctgcagaccatattccaatcaccaccacatcaaaatgtctacagtaggacgttgctaaccaaatatcacc

SEQ ID NO: 1842 - DNA, 37 bp, Homo sapiens
atgtaaatatcacttgtgtactcaaacaaaagttggt

SEQ ID NO: 1843 - DNA, 275 bp, Homo sapiens
tttgccaagtatgcaacaggcatatcactagtatatgaaaatgtaaatatcacttgtgtactcaaacaaaagttggttttaagcttccaccttgagcagccttggaaacctaacctgcctcttttagcataatcacattttttaaatgattttctttgttcctgaaaaagtgatttgtattagttttacatttgttttttggaagattatatttgtatatgtatcatcataaaatatttaaataaaaagtatctttagagtgaccctttccccat

SEQ ID NO: 1844 - DNA, 292 bp, Homo sapiens
gatacatagagagtcaatctggcttttgagaatttaccaagtgaacagagtacctagttcatcagccgtccagtaaagcaacccaggaaactgactgggtctctttgcctaccgtattaacattaaacattgatgttctgtattctgtactttactgcacccagcagactttcaacaactcattgatccaaagatacatgcacagtttgagccccagctatggtgctcataacttctttaagacttgaaccctttcaatttgtgtgattcattaaattggaccattgatgat

SEQ ID NO: 1845 - DNA, 193 bp, Homo sapiens; identical to SEQ ID NO: 560

SEQ ID NO: 1846 - DNA, 202 bp, Homo sapiens; identical to SEQ ID NO: 561

SEQ ID NO: 1847 - DNA, 166 bp, Homo sapiens
tgagctgtgtccctttactatgcaagcacatgaccccagagacagctggttcactggcagatccccatgatggacttactaagggaaaggtgagatgaacactgcccccaaggagggggtgaaatatgatctaacttatgcaagagcctataattagtcccagtct

SEQ ID NO: 1848 - DNA, 279 bp, Homo sapiens
cccacattggcccttggattgttcggattaaccccttccactcctcactggctggttcactgtgttctgactagtccataaaaataaagatggaaggagatcaaacacagaatcataatcataatgcggcccccttccccagagcttaccttgaatgtgaaatccctactttttataatgcagagttaaggagctgagcccccatgattttgtagctgtacttttgtatgtgtatatttttatagctgcagattgtccacacagtatacttttggaagt

SEQ ID NO: 1849 - DNA, 214 bp, Homo sapiens
gatgaaacatcaatactagagcccatgaggatgaaagaaattatcaaatagtgctgaacagaataagatgttaacgctgagttattaggactggaaggctatgaaaagaacttgaaattgtcggaatatgtgctctcttcatgtcatattcaatagaagtttttagtttaagattgattttgtgtttttttaggcatttcaagtgacaagcaaa

SEQ ID NO: 1850 - DNA, 93 bp, Homo sapiens; identical to SEQ ID NO: 572

SEQ ID NO: 1851 - DNA, 184 bp, Homo sapiens; identical to SEQ ID NO: 573

SEQ ID NO: 1852 - DNA, 186 bp, Homo sapiens; identical to SEQ ID NO: 574

SEQ ID NO: 1853 - DNA, 151 bp, Homo sapiens; identical to SEQ ID NO: 575

SEQ ID NO: 1854 - DNA, 258 bp, Homo sapiens; identical to SEQ ID NO: 576

SEQ ID NO: 1855 - DNA, 165 bp, Homo sapiens
agctgccaccccaaggggagtgacccctgccagcacaccctgcagccaagggccaggaagtggacaagaacgaacccttccttccgaatgatcagcagttccagcccctcgctgctgggggtgcaaccaccccttccttaggttgatgtgcttgggaaagctccc

SEQ ID NO: 1856 - DNA, 260 bp, Homo sapiens
tttgaaagagttctcctcataggaggatgattcagcatcagaagaagaaggaacccatagcttggtgtcattaacataattattttaagccttatccagcagccataatttgaataactctacgagaccagagagactgtagttccctattttaacctcaattatgcatttgtccccaaccccactgagaactaaatgctgtaccacagagccgggtgtgaactatggtttagaaggttcaagtttccaattaaagtcat

SEQ ID NO: 1857 - DNA, 280 bp, Homo sapiens
acatgtattttagcataaggaaattgaaaaagtaaaacatactggtttttttcaacaagaccatatgtaaattaaatagtgaaatgtgtatgagtttcagtagaactgtaccatcaacaatgtttccataaatatgcagagttctttcttttgtattgttatttacaatattgttaaattgaatgcatttgcaatttctaggattctaaagaattgagtacagaaagtagcaattttattatttgatgataatatgagaattactgtgccaatactgttt

SEQ ID NO: 1858 - DNA, 225 bp, Homo sapiens
ggtcaatagaaaaagtaggctgggcgcggtggctcacgcctgtaatcccagcactttgggaggctgagaagggcggatcacgaggtcaggagatggagaccatcctggctaacacggtgagaccccgtttccgctaaaaatacaaaaaattagccgggcatggtggcaggtgcctgtagtcccagctactcggcaggctgcagcaggaaaatggcataaacccgg

SEQ ID NO: 1859 - DNA, 32 bp, Homo sapiens
atgagaattactgtgccaatactgttttgata

SEQ ID NO: 1860 - DNA, 273 bp, Homo sapiens
gaaagaaaagatcactctacatacagatagtaaacttaatttgtgatcctatatatgagacagtataaaaatacagataagttttagaaagactcaaaacaatatgtaaatgactgatgtttgcattattaaggaaaacttgggatgttgggtcaagaggggaaagtgttagtcaatccacttggagcaatatcatgaaggtcaattataattccatatacctttctttgatgccacagtcagagatagaatacagttgggtggcatggatgt

SEQ ID NO: 1861 - DNA, 267 bp, Homo sapiens
aacaacctgagagccctaaatgaattcttatgattctcctaagtacctgctacttaatataaaaagataacttcacccaggacacttggatttatatttctcccttgaacatcatcatatatcaaggacaaggtgagattgttcttattgggcaggaaagaaaaaaactacctccataaagtgttccattttctttcttaatattaaatctaataactaggaaatgttgggcagatagaatgaaagtcgaagagttaagggcattga

SEQ ID NO: 1862 - DNA, 262 bp, Homo sapiens; identical to SEQ ID NO: 588

SEQ ID NO: 1863 - DNA, 288 bp, Homo sapiens; identical to SEQ ID NO: 589

SEQ ID NO: 1864 - DNA, 32 bp, Homo sapiens; identical to SEQ ID NO: 590

SEQ ID NO: 1865 - DNA, 244 bp, Homo sapiens; identical to SEQ ID NO: 591

SEQ ID NO: 1866 - DNA, 217 bp, Homo sapiens; identical to SEQ ID NO: 592

SEQ ID NO: 1867 - DNA, 239 bp, Homo sapiens; identical to SEQ ID NO: 593

SEQ ID NO: 1868 - DNA, 173 bp, Homo sapiens; identical to SEQ ID NO: 594

SEQ ID NO: 1869 - DNA, 199 bp, Homo sapiens
aaatggttctaagatagtgggtgtggaaatatgatccttttgttggctatttccttgatattatgggcagcaaggatttgtcgttttccattgatttcttttttctttttggcttctgaaataacaaaaacaattattgtgttgatttaataaagatttcaatagggatatttatatatcacttacctgattatgtatg

SEQ ID NO: 1870 - DNA, 248 bp, Homo sapiens
gactgatgctgcaagaaccatcttttctatgaaaatgactattttataatataccaatgttacattttctgaaacgtagcaaacaggatattcaaaagattctttggtggcctctgtttcttgttccctttctagatgtgtgcttttctcagctgttttcagctttgggaccaaagggattgttgacgttttcccagcaatcttaatctcatgactatgttcttctcccaaacaaggattgataggta

SEQ ID NO: 1871 - DNA, 247 bp, Homo sapiens
gcactttaagttctactctgaccaaattgaagatgagcagagcagccctgaacagcattttgtttatacagtcttgtttaagaatagaatttttttaactcttcattttttgtctctgtggaagctgtgtaactctttttaaaatgcaatttaaaacattttgttattctaacaattctctcaaaaaacagcatttccaatggtaatcggtattgttacgctgtacttatgtattccctgtacctga

SEQ ID NO: 1872 - DNA, 173 bp, Homo sapiens
aaaaatagttttgaggctggacacagtggctcacgcctgtaatcccagcactttgggaggtccaggtggtggatcacctgaggtcaggaatttgagaccagccaggccaacgttgcgaaacctcatcatctttactaaatatacaaaaatttagctgggcgttgtcgcgggtg

SEQ ID NO: 1873 - DNA, 268 bp, Homo sapiens
aacagcttcatgaaatcccagccttttattgtcctgacaaaaacaaggtgaatttcattcctaaaagtggatctgctttctgcctcgtcagcatcctcaagccactccttcctaccccggatcttacactcaagggctctggccacagcctgacagtcaccactggcatgacaaccactctgctgcagcctattgctgtggcctccctgtctacaaacacagagcaagaccgagtctctcgaggaacaagtacagtcatgccatcagc

SEQ ID NO: 1874 - DNA, 231 bp, Homo sapiens
cttaatgtcacattcccacgccaggcccaagagagattctatgacatatattatagagagaattctatatcaatatatataaatattagagattatgtacacaagggcatgggctcaaatgcccactgccagtcccccacccaggcttcagcatctctcttggcctggggaagtgggagggatgtgatgctggagaaggctacaggctgtgttcaatgacactaaacagaa

SEQ ID NO: 1875 - DNA, 121 bp, Homo sapiens
tggctgtttattaccttgttgcaaaacagggccgaagcaaggattaccttgacaaccctagcttctccttagccatcttccttgacagtgtgatctgtttagtgagatttagcatgtgtga

SEQ ID NO: 1876 - DNA, 259 bp, Homo sapiens
tgatgccttggcttaacaaagagtggacatggcaagccttcttctttggggaagaaaagcccagaactgagcagatggcctcctttatgagttcatgtcttcccccttcagctggaggtaccatatggcgatgctacctgtctttctgctggaggtaccatatggtaatgctgcctggctgtctgctggaggtaccatatggtaatgctgcctgtctttctgaggttgacttttatgccatgtctttcctaagtgtgta

SEQ ID NO: 1877 - DNA, 149 bp, Homo sapiens
agtgggtcaggccagtagttacactcttaggtcactgtagtctgtgtaaccttcactgcatccttgccccattcagcccggcctttcatgatgcaggagagcagggatcccgcagtacatggcgccagcactggagttggtgagcatgt

SEQ ID NO: 1878 - DNA, 205 bp, Homo sapiens
ctattatcaggtgtcttggccggttcatgccccacgatgaaagggccagaggttttcatatgagtaaaagaaaaaagcagaaatgtgaaacctacaattaggctaaacaaaaatcaactggaaaagtacaggctgaggggagaagagttggctacatgtttatgttaggggaggagggagtacattttagctatgtattcaaaca

SEQ ID NO: 1879 - DNA, 245 bp, Homo sapiens; identical to SEQ ID NO: 599

SEQ ID NO: 1880 - DNA, 157 bp, Homo sapiens; identical to SEQ ID NO: 600

SEQ ID NO: 1881 - DNA, 63 bp, Homo sapiens; identical to SEQ ID NO: 601

SEQ ID NO: 1882 - DNA, 281 bp, Homo sapiens; identical to SEQ ID NO: 602

SEQ ID NO: 1883 - DNA, 67 bp, Homo sapiens; identical to SEQ ID NO: 603

SEQ ID NO: 1884 - DNA, 220 bp, Homo sapiens; identical to SEQ ID NO: 604

SEQ ID NO: 1885 - DNA, 59 bp, Homo sapiens; identical to SEQ ID NO: 605

SEQ ID NO: 1886 - DNA, 128 bp, Homo sapiens
gcttctgttttctggtagcaattgtaaataattggtatcttttcctccttaaatgtttcatacaattcgctagtgaaacaatctaggcctgttgctttctttcttggaaggttgttaattattcatat

SEQ ID NO: 1887 - DNA, 71 bp, Homo sapiens
gagaaaaatgggaagttgttcacagatgcaaagattcagttaaaccggagaaatgcgttttgaaatctatt

SEQ ID NO: 1888 - DNA, 240 bp, Homo sapiens; identical to SEQ ID NO: 607

SEQ ID NO: 1889 - DNA, 39 bp, Homo sapiens; identical to SEQ ID NO: 608

SEQ ID NO: 1890 - DNA, 100 bp, Homo sapiens; identical to SEQ ID NO: 606

SEQ ID NO: 1891 - DNA, 244 bp, Homo sapiens; identical to SEQ ID NO: 1113

SEQ ID NO: 1892 - DNA, 270 bp, Homo sapiens; identical to SEQ ID NO: 609

SEQ ID NO: 1893 - DNA, 185 bp, Homo sapiens
aaatttttgtaatcgagtaaggcacacccaaatgtaaaaatccttttgaatgatgcctttataaatctttctctcactgtctatttaagtgcaattaacatatgtcacgaacttgaaagttttctaaactcaataaggtaatgaccagttgttatttacagctctgtaacctcccgttgcgtcaa

SEQ ID NO: 1894 - DNA, 275 bp, Homo sapiens
gaagcacggagccaatgtatgggatagaacattgcacagttctctttagaatgggagcatcagtgacctttttgtccttagttttttaagacaatgcaatataataaaatgataggctgagcaacagaaaaatttggtggaaatcaagtttgatatatgctgagcatatgtgaaatcagttttttaatttgagtgttagtcactgttagaatgtttgataatgtctggaatgagtcttttggttttatagttgacttgaggttttgcttaaaaag

SEQ ID NO: 1895 - DNA, 287 bp, Homo sapiens
ttattttcatatcctcagtcgggttttaactggaagtaggctaatccggttagctgaaatgtgtagctggcttgcaagcagcagtgtacttagacatcactgaacttaaggcccgcactcccttccacatattttggaaggtaataaatcacaatttgggtttagaatcaggagaactgtcttcaaaacacaactcccaatacatctcacatttttggtgctgactctactaatgagtgttttataataatatattaaagaaaagaggttttgcactatcctgaaga

SEQ ID NO: 1896 - DNA, 295 bp, Homo sapiens
ctccttaggaaatggctatgttagaggagcctcctgcagcagggttgatagggagaagcacttggggtttcaaagggggaggagaaaatgggcccattggggtcagatcaaagtaggtagtcaataaaaggtgcattgaaaaggatgcttaaatagacttcttttgctaatctgacctcttcaggctttacctgtagggatttgccaggctcctggaactccaaggcctgagccagcaagccaagggaggctgtctgtcatggcagcccctcctttgatcgaaatctttctggtt

SEQ ID NO: 1897 - DNA, 242 bp, Homo sapiens
tatgtatggacagggctgtatccactcaggagcaatcagatgtgaaacaaacttgaaagcattctctaaggcatacacagatccatcagcaaagagcagaaatcttattagctcaaagtgcttaagcagaacctctgaccaaacactggctgaacacataaatgtgtttgttcaaagaactaaaggaaatcatatttaaaaaaggaaggtaaaggaacaattacagttgttcctccatatcc

SEQ ID NO: 1898 - DNA, 35 bp, Homo sapiens
ttcaagaagtggaatgtgaccaggcgtgatggctc

SEQ ID NO: 1899 - DNA, 295 bp, Homo sapiens; identical to SEQ ID NO: 1896

SEQ ID NO: 1900 - DNA, 176 bp, Homo sapiens
taggctggccaataactccagagacagctgctaatactgtgcatttaacaaattggtgattttaagccctgggcgacacacgtaacctagactttgaatgttccatgggtttgcaagcaatgccatgaaattggactggccaccatacccacccatgtgcttggagggtgctacaa

SEQ ID NO: 1901 - DNA, 80 bp, Homo sapiens
atttacgttgatcacatctatttcattggcttaaggtttaatttaaatgcacaactaccttgtagaataaattacatact

SEQ ID NO: 1902 - DNA, 262 bp, Homo sapiens
cttctctgggttcttgctgtctcttagcctgtcagcttttctgtgcttttatgtttgaaaaacccatgttttttcccagcagaattgctccttccatttaacagcaagcatttttctctgtttagcaaatgaaaaacctaattataaatattgtattagttacctttactttgttacacattttacaatgttaagatttacgttgatcacatctatttcattggcttaaggtttaatttaaatgcacaactaccttgtagaa

SEQ ID NO: 1903 - DNA, 273 bp, Homo sapiens; identical to SEQ ID NO: 612

SEQ ID NO: 1904 - DNA, 224 bp, Homo sapiens; identical to SEQ ID NO: 613

SEQ ID NO: 1905 - DNA, 162 bp, Homo sapiens; identical to SEQ ID NO: 614
  misc_feature (28)..(28): n is a, c, g, or t

SEQ ID NO: 1906 - DNA, 228 bp, Homo sapiens; identical to SEQ ID NO: 615

SEQ ID NO: 1907 - DNA, 282 bp, Homo sapiens; identical to SEQ ID NO: 616

SEQ ID NO: 1908 - DNA, 289 bp, Homo sapiens; identical to SEQ ID NO: 617

SEQ ID NO: 1909 - DNA, 114 bp, Homo sapiens; identical to SEQ ID NO: 1123

SEQ ID NO: 1910 - DNA, 261 bp, Homo sapiens; identical to SEQ ID NO: 1124

SEQ ID NO: 1911 - DNA, 208 bp, Homo sapiens
tgatgggcgggcgagggtgtgttcgtgtgatgggttggagtgtgtgtgtctgagtacacagatgatgtgttttcccttcagcttcttacgttttctgagcatccgttgtgccttaacattttttgcttgtcctttgggacaaagcagtattttactcattctttgaatgttctcattcttttgtatcatgtgacttattaaaatcagt

SEQ ID NO: 1912 - DNA, 249 bp, Homo sapiens; identical to SEQ ID NO: 621

SEQ ID NO: 1913 - DNA, 202 bp, Homo sapiens; identical to SEQ ID NO: 622

SEQ ID NO: 1914 - DNA, 211 bp, Homo sapiens; identical to SEQ ID NO: 623

SEQ ID NO: 1915 - DNA, 164 bp, Homo sapiens; identical to SEQ ID NO: 624

SEQ ID NO: 1916 - DNA, 122 bp, Homo sapiens; identical to SEQ ID NO: 625

SEQ ID NO: 1917 - DNA, 231 bp, Homo sapiens; identical to SEQ ID NO: 1132

SEQ ID NO: 1918 - DNA, 131 bp, Homo sapiens; identical to SEQ ID NO: 1133

SEQ ID NO: 1919 - DNA, 263 bp, Homo sapiens; identical to SEQ ID NO: 1134

SEQ ID NO: 1920 - DNA, 213 bp, Homo sapiens; identical to SEQ ID NO: 1135

SEQ ID NO: 1921 - DNA, 272 bp, Homo sapiens; identical to SEQ ID NO: 1136
  misc_feature (201)..(201): n is a, c, g, or t

SEQ ID NO: 1922 - DNA, 236 bp, Homo sapiens
ctcttgaatttatggttagggtctcaagaaggaagcttgagactagactgtaatgtgtgtttgaaaaagcctgctcaaggatgaacttaattcttaaattctctaaagctcaagtggagaaatgacatctgcaaaaaatttatcttttagttgcattatgggtaataaagacaaacatgtgtaactgtttagtgtatttaaaagaaaaggagagataacccaagtgattagaggtt

SEQ ID NO: 1923 - DNA, 245 bp, Homo sapiens; identical to SEQ ID NO: 1138

SEQ ID NO: 1924 - DNA, 177 bp, Homo sapiens
agtggggctggttgccagtcagaagaacgacccggacgcagtggcactgatgcatcccgatggctctcctgttgtggtcgtcctaaaccgctcctctaaggatgtgcctcttaccatcaaggatcctgctgtgggcttcctggagacaatctcacctggctactccattcacaccta

SEQ ID NO: 1925 - DNA, 128 bp, Homo sapiens
tagggtgtataatctgtaacaactcggaggaagccaattgccctttagaaatatggctgcaattgcctcacttcctgtgtcatgtgactctcctagtcatcacatgacccatccacattgggaagcca

SEQ ID NO: 1926 - DNA, 224 bp, Homo sapiens
ggtccaggcctagggtgagctcactgtccgtacaaacacaagatcagggctgagggtaaggaaaagaagagactaggaaagctgggcccaaaactggagactgtttgtctttcctggagatgcagaactgggcccgtggagcagcagtgtcagcatcagggcggaagccttaaagcagcagcgggtgtgcccaggcacccagatgattcctatggcaccagcca

SEQ ID NO: 1927 - DNA, 33 bp, Homo sapiens; identical to SEQ ID NO: 628

SEQ ID NO: 1928 - DNA, 159 bp, Homo sapiens; identical to SEQ ID NO: 629

SEQ ID NO: 1929 - DNA, 245 bp, Homo sapiens; identical to SEQ ID NO: 630

SEQ ID NO: 1930 - DNA, 222 bp, Homo sapiens; identical to SEQ ID NO: 631

SEQ ID NO: 1931 - DNA, 251 bp, Homo sapiens; identical to SEQ ID NO: 211

SEQ ID NO: 1932 - DNA, 245 bp, Homo sapiens; identical to SEQ ID NO: 633

SEQ ID NO: 1933 - DNA, 300 bp, Homo sapiens; identical to SEQ ID NO: 637

SEQ ID NO: 1934 - DNA, 82 bp, Homo sapiens; identical to SEQ ID NO: 638

SEQ ID NO: 1935 - DNA, 300 bp, Homo sapiens; identical to SEQ ID NO: 637

SEQ ID NO: 1936 - DNA, 59 bp, Homo sapiens; identical to SEQ ID NO: 640

SEQ ID NO: 1937 - DNA, 174 bp, Homo sapiens; identical to SEQ ID NO: 641

SEQ ID NO: 1938 - DNA, 203 bp, Homo sapiens; identical to SEQ ID NO: 642

SEQ ID NO: 1939 - DNA, 178 bp, Homo sapiens; identical to SEQ ID NO: 643

SEQ ID NO: 1940 - DNA, 166 bp, Homo sapiens; identical to SEQ ID NO: 644

SEQ ID NO: 1941 - DNA, 61 bp, Homo sapiens; identical to SEQ ID NO: 645

SEQ ID NO: 1942 - DNA, 146 bp, Homo sapiens; identical to SEQ ID NO: 646

SEQ ID NO: 1943 - DNA, 263 bp, Homo sapiens; identical to SEQ ID NO: 1149

SEQ ID NO: 1944 - DNA, 234 bp, Homo sapiens; identical to SEQ ID NO: 1150

SEQ ID NO: 1945 - DNA, 140 bp, Homo sapiens
taatttcttttatgggtctgttagtcattcaacaaatcccataagtatgtgttaatattttaattgtgtaaaactcatttgttactttacagcctgtaatagtgtgtctgcattttcaacctgttgcaataactttgctg

SEQ ID NO: 1946 - DNA, 281 bp, Homo sapiens; identical to SEQ ID NO: 1161

SEQ ID NO: 1947 - DNA, 129 bp, Homo sapiens; identical to SEQ ID NO: 1162

SEQ ID NO: 1948 - DNA, 289 bp, Homo sapiens; identical to SEQ ID NO: 1163

SEQ ID NO: 1949 - DNA, 220 bp, Homo sapiens
aaattacacttttcttgtctgcgtgtaatgtttgcctggatccaataatttactttttcatgtgtaggtcattttcaagaaggctgttcaaaaaatcaaatatcagaaccaggagtgaaagcatcagatcactgcaaagtgtgagaagatcggaagttcgcatatattatgattacactgatgtgtaggccttttattgtttgttggaatcgatatgtac

SEQ ID NO: 1950 - DNA, 170 bp, Homo sapiens; identical to SEQ ID NO: 1176

SEQ ID NO: 1951 - DNA, 252 bp, Homo sapiens; identical to SEQ ID NO: 651
  misc_feature (100)..(100): n is a, c, g, or t

SEQ ID NO: 1952 - DNA, 298 bp, Homo sapiens; identical to SEQ ID NO: 652

SEQ ID NO: 1953 - DNA, 175 bp, Homo sapiens; identical to SEQ ID NO: 653

SEQ ID NO: 1954 - DNA, 278 bp, Homo sapiens
aatgtgaactctactaccacgacctccccatattcctcacttctccatcacctccagcctgactccctgtctgccctttcacccccaagattttgcacaggttaaggccagttatggcctttttgaaatctgtaatagctcccctttccccaactctaaagcctagaccttaaacctgttcctagagctatgcacacccctgccccagtttaccgttcctccctcagggcctccgtgacactccatgaaaagaagttcttgcataccggaaagttgaa

SEQ ID NO: 1955 - DNA, 238 bp, Homo sapiens
agggaggtgcgagctcctaagtaatggagcaaaaaaattttatttggtagaatggggagagaaaatgtgacattttaatttttttttgcatttatattcctaattcctacttaaagcgaatatactgccgctgtagatcataaaaggtatcttttccatggccaacaaggggcatcttttataaatgcataataacccagtttgtatcaaagggtatcgacttaagtgaaatttcaac

SEQ ID NO: 1956 - DNA, 255 bp, Homo sapiens
aagagtgatttgtggccgggcgcggtggctcacgcctgtaatcctagcactttgggaggctgaggcaggcgaattacctgaggtcaggagttcaagaccagcctggccaacatggtgaaactctgtctctactaaaaatacaaaaaattagctgggtgcagtggcacgtgcctgtaatcccagctactcgggaggctgaggaaggagaatcacttgaacccaggaggcgggggttgcggtgagcagagatcacgc

SEQ ID NO: 1957 - DNA, 287 bp, Homo sapiens
tgatctgtcatgtttaaaccccctacttctaagggaacttctctaatctcttatcctcatccccaaatagtgttttcttcctctgggttcttataatgttggtatcaatctcacagcatttagtgcttcctgcctggtgtgacagttacctgtgtgcatgtgcaatttctaatttcccacgctagactgtgagcttcctaaggcaagaatcatgccttgttggtttctgtattcctcatggtgccaaacacagtgccttctacattgcaggcgctgaataaacattt

SEQ ID NO: 1958 - DNA, 181 bp, Homo sapiens
ttttggcaagtatccaaattgcactggaggagctgcaggctacatcgaccgcctgctgctgggagacgatcacctttaccagcacccatcttctgctgtactttaccacaccgaggtggcctatgaccccgagggcatcctgggcaccatcaactccatcgtgatggcctttttaggagtt

SEQ ID NO: 1959 - DNA, 249 bp, Homo sapiens
ttctctaatctcttatcctcatccccaaatagtgttttcttcctctgggttcttataatgttggtatcaatctcacagcatttagtgcttcctgcctggtgtgacagttacctgtgtgcatgtgcaatttttaatttcccacgctagactgtgagcttcctaaggcaagaatcatgccttgttggtttctgtattcctcatggtgccaaacacagtgccttttacattgcaggcgctgaataaacattt

SEQ ID NO: 1960 - DNA, 273 bp, Homo sapiens; identical to SEQ ID NO: 213

SEQ ID NO: 1961 - DNA, 278 bp, Homo sapiens; identical to SEQ ID NO: 1193

SEQ ID NO: 1962 - DNA, 251 bp, Homo sapiens; identical to SEQ ID NO: 654

SEQ ID NO: 1963 - DNA, 89 bp, Homo sapiens; identical to SEQ ID NO: 163

SEQ ID NO: 1964 - DNA, 268 bp, Homo sapiens
  misc_feature (69)..(69): n is a, c, g, or t
  misc_feature (75)..(75): n is a, c, g, or t
  misc_feature (77)..(77): n is a, c, g, or t
  misc_feature (80)..(80): n is a, c, g, or t
  misc_feature (82)..(82): n is a, c, g, or t
  misc_feature (85)..(85): n is a, c, g, or t
  misc_feature (91)..(91): n is a, c, g, or t
  misc_feature (113)..(113): n is a, c, g, or t
  misc_feature (116)..(116): n is a, c, g, or t
  misc_feature (118)..(118): n is a, c, g, or t
  misc_feature (129)..(129): n is a, c, g, or t
  misc_feature (240)..(240): n is a, c, g, or t
ccccagttccaaaggagtggtggcttctcaattgcatggttgtgagcaaggaaatttcttgcaggatcngggatntnaanangcntagcangggaggggaggtttccaggctnccntnggaagtgtggnttggaatatgaattccggggaaggagggaagaagaagatgggaagagatgggaaacaacctcatctttggggctctggaaatctgagacactgggcagataatccacttcntaaagcctagccccaaacactaatttga

SEQ ID NO: 1965 - DNA, 252 bp, Homo sapiens
aattttatcttgtcctggtggtccaatttagatagcagagcaaggctgctgactgccaaatttcccccaagggaagaaggacaaggacaaggacactgaagacccttccctggcctttttgtccactgcccaggttcctgtctcccccttgatatgtcttaagtttaaataccattttctcactcataagagcctgtaacattttgccaacttcttcagctgtggtttaagtagcaagttgggaggtaaccg

SEQ ID NO: 1966 - DNA, 257 bp, Homo sapiens
caaattaacacacctgtgatgggaaagggcgaacgaggattaggggatggggaggaagagagagactgtggagctctggggggcaacctggaggtctgaaaagaggagccagagaaggtggtacccaggcttcctggtcagaaccggcctggagctccttcccttccccctggcctgagaggttgcttttaagtcttccaccccttgttccatctgcctgccaacccatcggaaaggaatccacatcatattggaga

SEQ ID NO: 1967 - DNA, 263 bp, Homo sapiens
gtcctggtggtccaatttagatagcagagcaaggctgctgactgccaaatttcccccaagggaagaaggacaaggacaaggacactgaagacccttccctggcctttttgtccactgcccaggttcctgtctcccccttgatatgtcttaagtttaaataccattttctcactcataagagcctgtaacattttgccaacttcttcagctgtggtttaagtagcaagttgggaggtaaccggggactcttggatgctctctgt

SEQ ID NO: 1968 - DNA, 258 bp, Homo sapiens
  misc_feature (42)..(42): n is a, c, g, or t
  misc_feature (49)..(51): n is a, c, g, or t
  misc_feature (54)..(54): n is a, c, g, or t
  misc_feature (58)..(59): n is a, c, g, or t
  misc_feature (61)..(66): n is a, c, g, or t
  misc_feature (69)..(74): n is a, c, g, or t
  misc_feature (78)..(78): n is a, c, g, or t
  misc_feature (82)..(83): n is a, c, g, or t
cccttcattcggaaatgaaacgcctttgatcttttctcaggntgtaaannnaantgcnngnnnnnnaannnnnngggncccnnctgcttggtctcccagcatttttctttacagctgtttctctctctttttaccactgaatttttccaaaaggacttttattacaccaccttcacacccagccgcctcttcctcctcccttcgctgagaggcgctttggaaaatatctagatattcgtttgatcacaaactaaaggc

SEQ ID NO: 1969 - DNA, 257 bp, Homo sapiens
ggacattgtgtttcctgtcatgtaaaaccagctattttagttactattgtactctagaaaagagctgtagatttatgttaaactcgtacttacgaacaattgtaattagttttaaaaggcatgaactcagctcctaatcgtcactgtatagtcctgaatttgtagaactagagttaattccctcttggaactttctttgtttttcagtagttacttttttccttacctaaaagggttgtctgtcaaacaattcttga

SEQ ID NO: 1970 - DNA, 137 bp, Homo sapiens
ttttttgtgtcatgtgagtcctctctccttttctctttttgacattccaaaaccaggccccttcctacctttggggctgcttgagtctagaacccttcgtatgtgtgaatatctgtgtgctgtacagagtgacaata

SEQ ID NO: 1971 - DNA, 69 bp, Homo sapiens
cagagcaggccaaccgagcgataagtaccgttgagtttgtgacagctgctgttggtgtcttctcattcc

SEQ ID NO: 1972 - DNA, 98 bp, Homo sapiens
aacctggggtgaatacttattttcagtgcatcattactgttccagattcctatgatggatggcagactctttaataaattgcttactgatattatctt

SEQ ID NO: 1973 - DNA, 235 bp, Homo sapiens
gaattccagttgtgtcgcttactacctgtgcgactttaggtctggcacttaactcatctgagtctcagtttcctcatctgtaaaatggtcaccacaataatcagctcgcagtctaacagaacaacctgtcaccactagaatcccacttgttggccttttatagccacacctacttccctcccactgcctcctccacttccttaactcatagcaaccactgtgtgttcactatctt

SEQ ID NO: 1974 - DNA, 120 bp, Homo sapiens; identical to SEQ ID NO: 1199
  misc_feature (35)..(35): n is a, c, g, or t
  misc_feature (88)..(88): n is a, c, g, or t

SEQ ID NO: 1975 - DNA, 109 bp, Homo sapiens; identical to SEQ ID NO: 1200

SEQ ID NO: 1976 - DNA, 119 bp, Homo sapiens
ggacccagggtgtgccagcccgtctctgtgcagtccctggaaggggcgctgagaaaggcaccagctccttggaccccacctcccatgctctcactctcatccccgttctcttgtccaca

SEQ ID NO: 1977 - DNA, 300 bp, Homo sapiens
cgcagggcctaggtgcctggacccagggtgtgccagcccgtctctgtgcagtccctggaaggggcgctgagaaaggcaccagctccttggaccccacctcccatgctctcactctcatccccgttctcttgtccacacagctcttccaataaaggtgtttctcttcctccttctcctccttcactgccgcctttgtcatctcctttggagggtgcatgggggacgggaggaggggcacgggtttaagggacttggggagccactggaagaataataaaagtgttgctctttatcatctac

SEQ ID NO: 1978 - DNA, 193 bp, Homo sapiens; identical to SEQ ID NO: 656

SEQ ID NO: 1979 - DNA, 32 bp, Homo sapiens; identical to SEQ ID NO: 1218

SEQ ID NO: 1980 - DNA, 170 bp, Homo sapiens; identical to SEQ ID NO: 1219

SEQ ID NO: 1981 - DNA, 143 bp, Homo sapiens; identical to SEQ ID NO: 1220

SEQ ID NO: 1982 - DNA, 67 bp, Homo sapiens; identical to SEQ ID NO: 1221

SEQ ID NO: 1983 - DNA, 256 bp, Homo sapiens; identical to SEQ ID NO: 1222

SEQ ID NO: 1984 - DNA, 161 bp, Homo sapiens; identical to SEQ ID NO: 9

SEQ ID NO: 1985 - DNA, 143 bp, Homo sapiens; identical to SEQ ID NO: 1224

SEQ ID NO: 1986 - DNA, 112 bp, Homo sapiens; identical to SEQ ID NO: 1225

SEQ ID NO: 1987 - DNA, 252 bp, Homo sapiens
cataaataatatgccttcacactggattgtaaaaggcatgtgatttttgagattttattttgtgatgtattgttttttgcagtattaaagggaaagagatattaatgtgcattaccctatcttgtttttgaagccagggtagttgtatgattttgttaccagcagtgctaacctgaatgtgacctggttaccttggaaatgcaggaacttatatgaatgtactataaaataaaatgcggactgattcccagg

SEQ ID NO: 1988 - DNA, 128 bp, Homo sapiens
aagattgaacaacagggaggcttcacctttgaaaacaaaggagtcctctccgcatttaattttgggactgtgcccagcaacaactgaaggaaagaacatcagctgaccaaatgtcatcgctgcatttt

SEQ ID NO: 1989 - DNA, 178 bp, Homo sapiens
cggcccccaggacaagtggtatgaccagtgataatgccccaaggacaaggggcgtgcctggcgcccagtggagtaatttatgccttagtcttgttttgaggtagaaatgcaagggggacacatgaaaggcatcagtccccctgtgcatagtacgacctttactgtcgtatttttgaaa

SEQ ID NO: 1990 - DNA, 138 bp, Homo sapiens
tgacctcatctcccgagcaatggcgcctgctccctccagaatggaactcaagctggttttaagtggaactgccctactgggagactgggacacctttaacacagacccctagggatttaaagggacacccctacacac

SEQ ID NO: 1991 - DNA, 284 bp, Homo sapiens
agatgtggtctttggctaggtttctgtagctaccttttgattttgcagaaaaagccaccacgtgagaatggccataagcagataagtagcagttcaactggatgtctctcttctccaaatgctacagtacaaagccctaagcatgagtggaaaatcgttgcttcagaaaagacttcaagtaagtatatgacacttgccagattgttttcagcttacctatttttaagaaggagtgttgccaatttaatacctcttaaattgactactcgaggaaaaactcagag

SEQ ID NO: 1992 - DNA, 218 bp, Homo sapiens
aaaacagtcctaaatagcagccctcaattgtgaaaaaatttactttaaaatacattaggttgtgaatgcaggttttatcagaaatatgtttttgttcagtttatttgttcatatggataaatattggttgggatgacttggggtttaatgtgtagtgctacacacctaacttatggggccaaaatagcatgtcctaatgcttgctgctgatttaaaca

SEQ ID NO: 1993 - DNA, 299 bp, Homo sapiens
tgtcatgtactttaccactgctcaacatgttttcaaattcccaatataataatcatattttagggaaaatccaggatttgagtatgtgatatatcattagaatccttgcttaattaacaaattaggtgtgtgccctattacctctcctgacctcagaattcttaaaattgaagtaggcaaaggaggagccccagtaggacatttctgtaactgcatgcagagttgccttcagaaaagtgaatatgattcatggaaaattcagttgctgtcgtaatttacacgcagctgctttttgttcc

SEQ ID NO: 1994 - DNA, 241 bp, Homo sapiens
attcagtggctaacttgggttaggaagaaaataattaggtattttctccaaatgttcactggtactttgccactttatttctttcatctgttacacagagaaccaccaggaaagcaaatcagtttggttggtaactctgtaattcctaactatcactggtttggttctggactaaaactacattgacagattgaatttgcctaatatgatgactgtttttaatatggatctgtatgtgttc

SEQ ID NO: 1995 - DNA, 166 bp, Homo sapiens
tacacttgtgaataaagagggtgggtgggtatagatgttgctaacagcaacacaaagcttttgcatattgcatactattaaacatgctgtacatactttttgggtttatttggaaaggaatgcaaagatgaaggtctgttttgtgtacttttaagactttggttat

SEQ ID NO: 1996 - DNA, 260 bp, Homo sapiens
tgagtaaacacataattattcagacacattatcaacaattactagagaacaaacttctcaagtataaattttttaagtttatggacaaatacagaaaagtacacaagtcataattaccacatagtgaacctaccagtgtaaacactacccaagtcaagaagaggtttctagcatcccggcagcctttctcttgcctcttcccaaccgtttccgtatagtgctcccaaaggaaaccattatcctaccttctgacacattaa

SEQ ID NO: 1997 - DNA, 292 bp, Homo sapiens
gtctattaggtggcagtctttgggctggaatatcccaactgatttctggttttattttctaaaattgttgccttggacccttcctatttttataaccagacacagaaaatcaataaaagtttgagcccagtttatagactattgccagcagtagttcaggttttaaaaaaatgatgagggattaatctaggggcatgaaggagaaaggatagattttttatttatgtctatatataaatagacatttatatttacaaaggttgacttagcaggccttagtgattgcttagca

SEQ ID NO: 1998 - DNA, 68 bp, Homo sapiens
ctcttccctcaaatgtgtactatggggtaaaaggggtagggtttaaagatgtagacagttgggttttt

SEQ ID NO: 1999 - DNA, 69 bp, Homo sapiens
gaaatggtatagttaagatggactatacaatgtaataagtctaaaagtggtggatcatatgttaaaacc

SEQ ID NO: 2000 - DNA, 241 bp, Homo sapiens; identical to SEQ ID NO: 664

SEQ ID NO: 2001 - DNA, 246 bp, Homo sapiens; identical to SEQ ID NO: 665

SEQ ID NO: 2002 - DNA, 233 bp, Homo sapiens; identical to SEQ ID NO: 1243

SEQ ID NO: 2003 - DNA, 274 bp, Homo sapiens; identical to SEQ ID NO: 1244

SEQ ID NO: 2004 - DNA, 244 bp, Homo sapiens; identical to SEQ ID NO: 1245
  misc_feature (196)..(196): n is a, c, g, or t
  misc_feature (208)..(208): n is a, c, g, or t

SEQ ID NO: 2005 - DNA, 215 bp, Homo sapiens; identical to SEQ ID NO: 1246

SEQ ID NO: 2006 - DNA, 271 bp, Homo sapiens; identical to SEQ ID NO: 1247

SEQ ID NO: 2007 - DNA, 295 bp, Homo sapiens; identical to SEQ ID NO: 1248

SEQ ID NO: 2008 - DNA, 144 bp, Homo sapiens; identical to SEQ ID NO: 1249

SEQ ID NO: 2009 - DNA, 250 bp, Homo sapiens; identical to SEQ ID NO: 1250

SEQ ID NO: 2010 - DNA, 274 bp, Homo sapiens; identical to SEQ ID NO: 1244

SEQ ID NO: 2011 - DNA, 208 bp, Homo sapiens; identical to SEQ ID NO: 1252

SEQ ID NO: 2012 - DNA, 191 bp, Homo sapiens
ttcattttaaaggtttccatagaatttagttattttatctttcagccatatgctagtttttttttctcttgccaacatgcgtaaaaagggaagccaattacaagtgcaaataatgtggtattcttttgtaactcaagtcttgaaatgttctgtagtgttaagcaaagtctcctcttgcttgatactaaata

SEQ ID NO: 2013 - DNA, 118 bp, Homo sapiens
ctcagtgaggagacttatgattcctacgggcaagaagagtggactaactcaagacacaaggcaccttcagcgaggacagcaaagggcgtttacagagaccagccatatggcagatact

SEQ ID NO: 2014 - DNA, 267 bp, Homo sapiens
ttccttctatttatgcactgcttaagaaccgtcaactcaccaacgtgcctagtcagcaaatgaatccacttgggaacttgaaaaacatcttaattaatttttgtttgcataattttgtgttctgtgacatgtttttattatatggtatgcttttaatttggagaacctacttttttaaaaaacggaaagaaaatctatcttattttgttgactcccaataacaaaaagagaatgatttgtatagtagttaataaaggctgcctattg

SEQ ID NO: 2015 - DNA, 143 bp, Homo sapiens
ccttcagcttgcttacagtggcttgcatcagtagcactgccttgcagatacccgtttgacctcatcttcctccactgacccagttttctacttccaacttttctaatacagcttgcaacctctggcataacttcagaccttgg

SEQ ID NO: 2016 - DNA, 215 bp, Homo sapiens
gtagataaagcccttcagcttgcttacagtggcttgcatcagtagcactgccttgcagatacccgtttgacctcatcttcctccactgacccagttttctacttccaacttttctaatacagcttgcaacctctggcataacttcagaccttggccattggtctcaactgtttgaaaacctaaagattactcacccatcacgcttagttttgcag

SEQ ID NO: 2017 - DNA, 108 bp, Homo sapiens; identical to SEQ ID NO: 1253

SEQ ID NO: 2018 - DNA, 227 bp, Homo sapiens; identical to SEQ ID NO: 1254

SEQ ID NO: 2019 - DNA, 248 bp, Homo sapiens; identical to SEQ ID NO: 1255

SEQ ID NO: 2020 - DNA, 207 bp, Homo sapiens; identical to SEQ ID NO: 1256

SEQ ID NO: 2021 - DNA, 240 bp, Homo sapiens; identical to SEQ ID NO: 1257

SEQ ID NO: 2022 - DNA, 145 bp, Homo sapiens; identical to SEQ ID NO: 1258

SEQ ID NO: 2023 - DNA, 190 bp, Homo sapiens; identical to SEQ ID NO: 1259

SEQ ID NO: 2024 - DNA, 235 bp, Homo sapiens; identical to SEQ ID NO: 1260

SEQ ID NO: 2025 - DNA, 246 bp, Homo sapiens; identical to SEQ ID NO: 1261

SEQ ID NO: 2026 - DNA, 132 bp, Homo sapiens; identical to SEQ ID NO: 670

SEQ ID NO: 2027 - DNA, 126 bp, Homo sapiens; identical to SEQ ID NO: 671

SEQ ID NO: 2028 - DNA, 75 bp, Homo sapiens; identical to SEQ ID NO: 672

SEQ ID NO: 2029 - DNA, 268 bp, Homo sapiens; identical to SEQ ID NO: 673

SEQ ID NO: 2030 - DNA, 264 bp, Homo sapiens; identical to SEQ ID NO: 674

SEQ ID NO: 2031 - DNA, 73 bp, Homo sapiens
cagcagacagccctacagatcgtacacacgttttccaaaactaacaatggaacaggcggcaaacctatgccaa

SEQ ID NO: 2032 - DNA, 99 bp, Homo sapiens
aattagctggatgtggtggcagtgcctgtaatcccagctatttgggaggctgaggcaggagaatcgcttgaaccagggagtcagaggtttcagtgagcc

SEQ ID NO: 2033 - DNA, 261 bp, Homo sapiens
aactagtgagtggattgccgaagaggagctcccaccttccccactgccgtcggggggagtcttcttgtaaatatatctaattgcaataacatcttaacagaagggggtgtcaaacagaggcatcagcctgctgttgatcacagagagaaattgagtagaaagaccaaaagaatgtgacctatttgaaactttctgtcttaagatgcttcttgacatgctgcataactacataaacagcagaggtgtttaagagcccagaaa

SEQ ID NO: 2034 - DNA, 249 bp, Homo sapiens
gcaagccacgtaaacagtggcaaatgtgtgtgtgttttccatttgtttggtaagcagccattttactcttgcactgtaatgaactgaagggaaatataagataatgcttttttccccccatattgctattcaactacctctatatgcttgatttctttttaggattcccatcctccaaatctgtacaaaaacgtttcagctcatctgtgttgtaataacaatgtgatacagacagtttgtgtgaaagtt

SEQ ID NO: 2035 - DNA, 222 bp, Homo sapiens
gatacatggcaggtaactgtttatgggagaaaagtacagtgctgttacgtggcactgtacagtcatgtgccacgtaacagcgtctgggtcagtgacggacacttacctgacagcggatccacaatattctcgtgcagtgtgtttggaatcctggtctgggctctcggcgttggccttgtagatcaagtaggggaagtgagtgatgttcagtcatgctgctgg

SEQ ID NO: 2036 - DNA, 172 bp, Homo sapiens; identical to SEQ ID NO: 693

SEQ ID NO: 2037 - DNA, 87 bp, Homo sapiens; identical to SEQ ID NO: 694

SEQ ID NO: 2038 - DNA, 144 bp, Homo sapiens; identical to SEQ ID NO: 695

SEQ ID NO: 2039 - DNA, 209 bp, Homo sapiens; identical to SEQ ID NO: 696

SEQ ID NO: 2040 - DNA, 245 bp, Homo sapiens
aaaggtgaaaacattacatccgtggattctcctgccacaaccgcattggaagaaaaggctgccgcaacatttcagcgaggagtgaaggacccatgtcccaggaaccgcgctgcgccacctgcactcacccccctcacatttttttaagcacccggtggccctccgaggcctggcggaatggtggtgcccacggggttgggcaagggctcaccaggacctcaacgggcaaagttgtgcacactaaa

SEQ ID NO: 2041 - DNA, 260 bp, Homo sapiens
tggtttgaggccttacagttttgtatttacatttttcccctcctggggtttgcggggacagggacagaactacaggagtcatgggaaagaaaattctggcttcactactgctccctgctcactttttgatcactttgatactttttttttttttttttttgcaacctgataccttgaaaagcttttatgtgtctctccttttgttgcctggcagctgtttaggatgatcactgattactatttactaagtagccacatgc

SEQ ID NO: 2042 - DNA, 261 bp, Homo sapiens
ctggtttgaggccttacagttttgtatttacatttttcccctcctggggtttgcggggacagggacagaactacaggagtcatgggaaagaaaattctggcttcactactgctccctgctcactttttgatcactttgatactttttttttttttttttttgcaacctgataccttgaaaagcttttatgtgtctctccttttgttgcctggcagctgtttaggatgatcactgattactatttactaagtagccacatgc

SEQ ID NO: 2043 - DNA, 298 bp, Homo sapiens
cattaactgctacgcatttagtgagggtcacattattaaacttggagtttaccattttcccacaggagatttcgctggcattccttggaactcccaatttcagtagggcaatgaatgaatgaatactttgcagtgctacttttggaaggaatttctgctttttgccttatgattggacaaaatgcagctgtaaaattttaaattgtttttgatatgttattcaatatcccatgaaagtattcacctaaagtggagttatgaaatggatggtgaaataataagaccattctggagcagg

SEQ ID NO: 2044 - DNA, 193 bp, Homo sapiens
gtaattgtctatgcattttaagttaaactgcctaaaatgtgatttgagacatatacatatgtttgtattataaattgtaagcaatcagtttgagatactaggttttatcacctgctgctgtatttgtaaacaaagacaaatgttgctttaagaagtaattataattaggaataggctatggatgtgatacttg

SEQ ID NO: 2045 - DNA, 235 bp, Homo sapiens
tgatttatacgggaagatgtgcattggttatatgcaaatactacgccattttatatcaggtacttgagcattctgggatttgagtatttatgggggtcctagaaccaatttccctcaggtaccgagggactatactataccttgtttttgaacgagatgatttgacattttaaatagatgttcccctcgatttatccgtaaatataatacatttccaaccagaatgttaacacat

SEQ ID NO: 2046 - DNA, 249 bp, Homo sapiens
aaacttcgagaataacccatcataatccaaacaaatgatgcctcaacattttgagctgctctgtcggacaaataaacctggtcctcttgaggttatattttggatatacatttttaaactgtcagtaattattgtcagatgtggagttcaatagccagccagtgttcatttttatccttgagcttttagtaaaaacttcctggttttatttttagtcattgggtcatacagcactaaagtctgctattt

SEQ ID NO: 2047 - DNA, 299 bp, Homo sapiens
agactgggccgcgtagacacatccattcatgtgcatctttgggatatgggaggaaactggagtacttggagaagacccataaagatgggagaatgagccagcttcacacagacagtgacctcagctgagactttttgttttttcttctcatcaacattataacaaaacaaagttgaatgaaacgtctttcgaggacctgctatagactaaaattttaaaaccctgtcccatatatgaacgaacaattagaaaatacagtagaagaaaagagcccatttacaaccacagggtattgaagc

SEQ ID NO: 2048 - DNA, 199 bp, Homo sapiens
atatcaagtattgtttataaccaccaaaaaaaaaaaagccctggtagttttttggcaccttatgtttaaatcagattcttagatttggagtagacctgaccttgttatttattagataacattttgaatgtatccattggatttctaaaatgtattgtgaatttttcagacaaacaggatttatgctggagctctgttt

SEQ ID NO: 2049 - DNA, 217 bp, Homo sapiens
tgagatgatttatacgggaagatgtgcattggttatatgcaaatactacgccattttatatcaggtacttgagcattctgggatttgagtatttatgggggtcctagaaccaatttccctcaggtaccgagggactatactataccttgtttttgaacgagatgatttgacattttaaatagatgttcccctcgatttatccgtaaatataatacat

SEQ ID NO: 2050 - DNA, 298 bp, Homo sapiens; identical to SEQ ID NO: 2043

SEQ ID NO: 2051 - DNA, 169 bp, Homo sapiens
acccatgatttttaccctaacagccatgagagtttccaaaaatgttatgttttacttttttagtgtatgtcaaaagacattttgtactgttttaaaattactattcttgctattcaaagaataaaaagtattgtttttcagatgatgggtggatcatgctataaaatgg

SEQ ID NO: 2052 - DNA, 215 bp, Homo sapiens
tagctttggttttcctgtttacttcatagggttggaataaggataaatgagggacaggttggatgccgttgcagagaaaatcagcaatgacataaagagatttttagaatagttgatggtccatttatttcaaatagtagctggtgtaacaaattttaaaatgtgtttttcatttggagttgcacagaatcatggaattttgtgttgagtgacat

SEQ ID NO: 2053 - DNA, 176 bp, Homo sapiens
ctccaaccccagtttaagctatttccatggcagtttagggtcacaggtttgatcccggtgtgcccagccagtggtattaatggatggcattatgtttggaggcagcagcatagaggactgttgtttatagagaaaagatttgggaaggactgtttacaatgtgggtcagcctgaag

SEQ ID NO: 2054 - DNA, 97 bp, Homo sapiens
ggctcgtgcctgtaagctactcgcgaagctgaggcgggagaatccttgaacccgggaggcagaggttgcagtgagccgagatcacagcccctgcact

SEQ ID NO: 2055 - DNA, 134 bp, Homo sapiens
gaaaggggctgtagacccctattccccaccccatggccacagggcatctggcaataagactagtatacattgacctcccgttccctgcatgagggcggggagttccccctgctccatcccccattgcatggggg

SEQ ID NO: 2056 - DNA, 205 bp, Homo sapiens
tacttcatagggttggaataaggataaatgagggacaggttggatgccgttgcagagaaaatcagcaatgacataaagagatttttagaatagttgatggtccatttatttcaaatagtagctggtgtaacaaattttaaaatgtgtttttcatttggagttgcacagaatcatggaattttgtgttgagtgacataataggtat

SEQ ID NO: 2057 - DNA, 38 bp, Homo sapiens; identical to SEQ ID NO: 697

SEQ ID NO: 2058 - DNA, 240 bp, Homo sapiens; identical to SEQ ID NO: 698

SEQ ID NO: 2059 - DNA, 280 bp, Homo sapiens
tgtacttcactcaaggagaaccaatcatattttctctctgtctctcaaaaaaaaattgaactgagaccagtgagtaagttggtgtctgggtcaggttaatggtggtgaactatgtgcctgtgagctcttcagagctggttgggttcaccaccttcataagacctgcctctgtaccatttttccttgagtgtgctttgtataaaggtctgtacaataaatcacacttttttaaagcttagattgaataggtttctgctccttgacaagagatatggcctga

SEQ ID NO: 2060 - DNA, 263 bp, Homo sapiens
  misc_feature (52)..(52): n is a, c, g, or t
  misc_feature (54)..(56): n is a, c, g, or t
gtcagtcttagataataccatgcaaggcaattaaatcactgtgacagcacanannncagagttccgtcattttgcattacttgtatccactcatgttttgtttcataataattgcattttcttagaactattttggtgtcaaatgctattttttatattacattaaaatagagttgtcagtcattgcatctgcccatacatcttctgagagaacctgcttccttccatcaaccatacctaagacctgcacctaagtggccatg

SEQ ID NO: 2061 - DNA, 250 bp, Homo sapiens
gatgccttgagcttgagaggttgaagctgcagtgagctgtgatcgcaccactgcactccagcttggttcatggagaccctgtttttttaaaaaaagaagtggaggtgtttacaccagcaaaatactcattttttaagtgtaattaagttgaagatcaaaaaatggaaatgtataattaaatcatacttagcaaatctaacacatgaaatgtaacatctgcatatggagaaccgtgttactttattgaaaa

SEQ ID NO: 2062 - DNA, 237 bp, Homo sapiens
cagagatgggatcagcgctgatgctgaggctgggactggccggagcttgagtgaggggttgtttaaaggagaaactgggctctggtcgttaaagcctgaggagagtactggcttatacggagattctgcccttgattgataggtgagggaggacccttaggttattggcgagaagctcaggtgagagcgggcctctgggaggatggagtggtgacagctataggaatggaaacgaat

SEQ ID NO: 2063 - DNA, 250 bp, Homo sapiens
gatgccttgagcttgagaggttgaagctgcagtgagctgtgatcgcaccactgcactccagcttggttcatggagaccctgtttttttaaaaaaagaagtggaggtgtttacaccagcaaaatactcattttttaagtgtaattaagttgaagatcaaaaaatggaaatgtataattaaatcatacttagcaaatttaacacatgaaatgtaacatttgcatatggagaaccgtgttactttattgaaaa

SEQ ID NO: 2064 - DNA, 277 bp, Homo sapiens; identical to SEQ ID NO: 714

SEQ ID NO: 2065 - DNA, 166 bp, Homo sapiens
tgagaatttaggccaagtgtggtggctcatgcctgtaatcccagcactttgcgaggccgaggtgggcagatcacttgaggtgaggagttcaagaccagcctggccaacatggtgaattatttttactaaaaatacaaaaaaaataataataatagccaggcgtggt

SEQ ID NO: 2066 - DNA, 174 bp, Homo sapiens
ggagacttcatgtgcccccaatttttcactattgttatttgaaaaaatatttttatttgtaagagtttttctttatttaaaatgttcattaataaagttgttggacgggaagcaaaaaaaaaaagttgtttaagataaattcccagaagtgaatttgttagatcaaacacttaa

SEQ ID NO: 2067 - DNA, 246 bp, Homo sapiens
aagcagtctactagattgtgatcccttgagatatggaaggatgcctttttttctctgcatttaaaaaaatcccccagcacttcccacagtgcctattgatacttggggagggtgcttggcacttattgaatatatgatcggccatcaagggaagaactattgtgctcagagacactgttgataaaaactcaggcaaagaaaatgaaatgcatatttgcaaagtgtattaggaagtgtttatgttgt

SEQ ID NO: 2068 - DNA, 126 bp, Homo sapiens; identical to SEQ ID NO: 723

SEQ ID NO: 2069 - DNA, 199 bp, Homo sapiens; identical to SEQ ID NO: 724

SEQ ID NO: 2070 - DNA, 224 bp, Homo sapiens; identical to SEQ ID NO: 725

SEQ ID NO: 2071 - DNA, 230 bp, Homo sapiens; identical to SEQ ID NO: 726

SEQ ID NO: 2072 - DNA, 280 bp, Homo sapiens
tgaggaaacgtctctcccactgtttgtactctcaccttcattcttcaattcagtctaggaaaccatgctgtttctctatcaagaagaagacagagattttaaacagatgttaaccaagagggactccctagggcacatgcatcagcacgtatgtgggcatccagcctctggggccttggcacacacacattcgtgtgctttgctgcatgtgagcttgtgggttagaggaacaaatatctagacattcaatcttcactctttcaattgtgcattcatttaa

SEQ ID NO: 2073 - DNA, 155 bp, Homo sapiens; identical to SEQ ID NO: 1319

SEQ ID NO: 2074 - DNA, 133 bp, Homo sapiens; identical to SEQ ID NO: 1320

SEQ ID NO: 2075 - DNA, 44 bp, Homo sapiens; identical to SEQ ID NO: 1321

SEQ ID NO: 2076 - DNA, 240 bp, Homo sapiens; identical to SEQ ID NO: 733

SEQ ID NO: 2077 - DNA, 112 bp, Homo sapiens; identical to SEQ ID NO: 734

SEQ ID NO: 2078 - DNA, 263 bp, Homo sapiens; identical to SEQ ID NO: 735

SEQ ID NO: 2079 - DNA, 153 bp, Homo sapiens; identical to SEQ ID NO: 1339

SEQ ID NO: 2080 - DNA, 249 bp, Homo sapiens; identical to SEQ ID NO: 1340

SEQ ID NO: 2081 - DNA, 240 bp, Homo sapiens
  misc_feature (133)..(133): n is a, c, g, or t
gtatatacttccaggccataagagttgatggtattatttatgactttgtagattaagttatttatgtatgaaacaaagcaggaaaatatattgagaagggatcgtgtttacagaggacttctttaaagtgtcncatttttaaaatgtaaacatatttttaatgcatacttaagtaatatttaagaaactaaacaaaataatgatacaattgcagtgttgtgcttgttgtcaatgacaaaa

SEQ ID NO: 2082 - DNA, 139 bp, Homo sapiens
gaaagtgacagaatgggccaggcacagtggcttaatgcctgtaatcccaacactatgggacaccaaggtgggtggatcacctgatgtcaggagttcaaaaccagcctgaccaacataatgaaactccatcttttttaaa

SEQ ID NO: 2083 - DNA, 227 bp, Homo sapiens; identical to SEQ ID NO: 1341

SEQ ID NO: 2084 - DNA, 262 bp, Homo sapiens
ttataagtacattggagtggtcagcagtgtcagatgtagtgagatactatagtgagttcaaatgaggtttaaaaagtgtcctttgaattaagcaactaggcagtcattagagatagcaagcattattttttttaaacattacctgaagagaaggaaactggtcataaaagaggtgttggttttgggtttggtgggcatgttaaaaaacatagtaactatagcatttttatatttgaccaaaaagcagcagtaggcacagtgc

SEQ ID NO: 2085 - DNA, 265 bp, Homo sapiens
ttataagtacattggagtggtcagcagtgtcagatgtagtgagatactatagtgagttcaaatgaggtttaaaaagtgtcctttgaattaagcaactaggcagtcattagagatagcaagcattattttttttaaacattacctgaagagaaggaaactggtcataaaagaggtgttggttttgggtttggtgggcatgttaaaaaacatagtaactatagcatttttatatttgaccaaaaagcagcagtaggcacagtgcagt

SEQ ID NO: 2086 - DNA, 258 bp, Homo sapiens
attgtagaagcattgacacttctcaataatcataagcttttcccagaaacctggactgctgagaaaataatgcaggaataccagttagaacagaaagatgtgaattctcttcttaaatattttgttacttttgaagtcgaaatcttccctcctgaagacaagaaagcaatacgatcaaaatgaagaaaatcacagaaatttcctatgtgtactcctcatccctcctgctgtatattttctcattttttgcgtaataaa

SEQ ID NO: 2087 - DNA, 278 bp, Homo sapiens
gtaagcatgactttgaatgtagatttgttatgtgaacaaactacctagtttatttttagttcaatacaataattgttttaagaaaacaagaaataactactcaatttaaaatgcattttaaaactgtaaaaaagtcaaaacttttttttttttatcataatggtcactaggtgagtcacaaattttagtccatttttttgagccatcttctttattcatatttacattgtggggttaggcatttgttatgtggtgtcccatgataaaataaagaactt

SEQ ID NO: 2088 - DNA, 241 bp, Homo sapiens
atatggctaagtgtggccccaccaccctttttgccctcccgggacattgattggtcctgtcttgggcaggtttagtgagctgtagaattgaatcaatgtgaactcagggaactggggaaggctgagcctcctctttggtgttgcggtaagataaccgacagggctggtgaaagtccccagatggcaggatatttggtttcagagtaaggactaggtgcaccaccatgactgactatcaatc

SEQ ID NO: 2089 - DNA, 35 bp, Homo sapiens
aatatttgtagagtctctatggttctgtcaatgca

SEQ ID NO: 2090 - DNA, 47 bp, Homo sapiens; identical to SEQ ID NO: 1344

SEQ ID NO: 2091 - DNA, 281 bp, Homo sapiens; identical to SEQ ID NO: 1345
  misc_feature (220)..(221): n is a, c, g, or t
  misc_feature (223)..(224): n is a, c, g, or t
  misc_feature (226)..(230): n is a, c, g, or t
  misc_feature (232)..(235): n is a, c, g, or t
  misc_feature (237)..(238): n is a, c, g, or t
  misc_feature (240)..(240): n is a, c, g, or t
  misc_feature (242)..(245): n is a, c, g, or t
  misc_feature (248)..(249): n is a, c, g, or t

SEQ ID NO: 2092 - DNA, 133 bp, Homo sapiens; identical to SEQ ID NO: 1346

SEQ ID NO: 2093 - DNA, 103 bp, Homo sapiens; identical to SEQ ID NO: 1347

SEQ ID NO: 2094 - DNA, 236 bp, Homo sapiens; identical to SEQ ID NO: 1348

SEQ ID NO: 2095 - DNA, 93 bp, Homo sapiens; identical to SEQ ID NO: 1349

SEQ ID NO: 2096 - DNA, 228 bp, Homo sapiens; identical to SEQ ID NO: 1350

SEQ ID NO: 2097 - DNA, 249 bp, Homo sapiens; identical to SEQ ID NO: 1351

SEQ ID NO: 2098 - DNA, 291 bp, Homo sapiens; identical to SEQ ID NO: 1352

SEQ ID NO: 2099 - DNA, 229 bp, Homo sapiens; identical to SEQ ID NO: 1353
  misc_feature (137)..(137): n is a, c, g, or t
  misc_feature (178)..(179): n is a, c, g, or t
  misc_feature (193)..(193): n is a, c, g, or t

SEQ ID NO: 2100 - DNA, 233 bp, Homo sapiens; identical to SEQ ID NO: 1354

SEQ ID NO: 2101 - DNA, 213 bp, Homo sapiens; identical to SEQ ID NO: 1355
  misc_feature (121)..(121): n is a, c, g, or t
  misc_feature (162)..(163): n is a, c, g, or t
  misc_feature (177)..(177): n is a, c, g, or t

SEQ ID NO: 2102 - DNA, 205 bp, Homo sapiens; identical to SEQ ID NO: 1356

SEQ ID NO: 2103 - DNA, 113 bp, Homo sapiens; identical to SEQ ID NO: 117

SEQ ID NO: 2104 - DNA, 266 bp, Homo sapiens
tatgcgatcatattaatagacctaatttcattaaaacaggtagaagatttttcaaaagaaagatgatgtttcaaagctggtctgccattctagatgagcctccttgcttatttaagttccagtaggtgttcaaatgttaaatgttaaacataggtcatctttgcttctgcagggcttcatcttgcatgtttaagagaactttgttttattttgagggattatttctctggggatcattcttataatacaagccttaaatcactaat

SEQ ID NO: 2105 - DNA, 181 bp, Homo sapiens
ttttgcacttttacactcaggtgagatggatgtaaccaggcatcatattttcaggtctggttttatgtaacagtgatacgtgacaaaccagggtccagcttttggatcctatgaggggaactctttagttttggggtttcatggtataataaagtagtgactcctgtaagtatgaaactgt

SEQ ID NO: 2106 - DNA, 179 bp, Homo sapiens
tagttgtattaagagtttaaatggcttactagaagttatatattgttaattctatttttgctgcctctttctaaaattattaaaattaaataggtactaagaaactgaaatcgatgtaatccccttttccctccaagagattctattataagaagttattttaggtgtttgtgggaagc

SEQ ID NO: 2107 - DNA, 235 bp, Homo sapiens
ctctaaaaggggcatactatctctttagaaattaatcagtttttgccttcacatttggtcttcaattgctgtatagcattgtttcactctctaaattatgtgtcatagctatagaggtccatgaattgctgcagctgtcgttaagggggcatttttctatggtccatagaataagcactgtttgtatcctcttttcacaaacatttttttaaagttcccatgatggtctaagaga

SEQ ID NO: 2108 - DNA, 246 bp, Homo sapiens
gcagtttagagggaatggcattgactattaagagcaaagaatatgataatttagttcaaagtcagttcattcagtgaaaatatcaactggttttccttatcacatcaacttggtagctttttgaatttacaaataaccaattttttaatacaactgcattaattttttacttaagaagaatttgaacgcttttaatgtaatgaaacattttggttttattaagtgcaatactggtaagacttggaa

SEQ ID NO: 2109 - DNA, 248 bp, Homo sapiens
gcagtttagagggaatggcattgactattaagagcaaagaatatgataatttagttcaaagtcagttcattcagtgaaaatatcaactggttttccttatcacatcaacttggtagctttttgaatttacaaataaccaattttttaatacaactgcattaattttttacttaagaagaatttgaacgcttttaatgtaatgaaacattttggttttattaagtgcaatactggtaagacttggaaaa

SEQ ID NO: 2110 - DNA, 205 bp, Homo sapiens
acgcagtttcccaggttcttgcctaatagttgtattaagagtttaaatggcttactagaagttatatattgttaattctatttttgctgcctctttctaaaattattaaaattaaataggtactaagaaactgaaatcgatgtaatccccttttccctccaagagattctattataagaagttattttaggtgtttgtgggaagc

SEQ ID NO: 2111 - DNA, 47 bp, Homo sapiens
ttaatctttttaaagcgtgctgcaggatgggatattggcgttgagtg

SEQ ID NO: 2112 - DNA, 34 bp, Homo sapiens
ttctgtacccacgcataaccactatacatagttt

SEQ ID NO: 2113 - DNA, 254 bp, Homo sapiens
gcactggtgagcgttggaaccttgtcgtctggctccgagcctttgctgtgcgcaacagcctttgtcccatgtgctgccgtgagcccgacctggtggacgatgagggcttcggtgatggcttcacccgagaggagcccgccacggtggatgtatgtgcgctcacctgagcttgcttgggcccagtgtgggggtggcaggcaggtgagggctccgttgccttggtttgggggcagaaataaaatccccgcagccta

SEQ ID NO: 2114 - DNA, 292 bp, Homo sapiens
gtgccttccagtagccaagggaagcctccagagagcacagatgtgaaccctcagcagcaggcatcaccccccagtggactcgggtgggccaccagtagcattttttagatggcagaggggtgaatggcagggccaggaaccaggctgcccgggttcccattttgcttttgccacttccagctgtgtggctttaggtgagccttcaccttttggtgccttcgtttcctcatttagcacctacctcctagagctgttttgggagtcaaatgcgctgacgtatataaagtgcttt

SEQ ID NO: 2115 - DNA, 177 bp, Homo sapiens
gactacacaaatcaatgcggaactcaagccatacatcacggaaggaagaataacggagaaggagataagagatcatatttcaaaagagactttgttctatatttgtggcccacctccaatgacagactttttctccaagcaactggaaaacaaccatgtacccaaagaacacatttg

SEQ ID NO: 2116 - DNA, 267 bp, Homo sapiens
tacctacctacatgatagggctgttacggggattgaaggtgatcatacatgtaaagtgcttggcagagcactgcatgagtgtgttgtcgttattaatttgctattccttgtcctattcagaaaggatttcaagaggctggatgccttagatgtggtttaacttgaaaccttcatgtgggtgtgcgtctgtcttgtttattgctgtgccaggcacaaaataggtatttcataaatatttgttaatatgctcagagttgataagctgga

SEQ ID NO: 2117 - DNA, 192 bp, Homo sapiens
  misc_feature (69)..(70): n is a, c, g, or t
  misc_feature (89)..(89): n is a, c, g, or t
  misc_feature (121)..(123): n is a, c, g, or t
  misc_feature (133)..(133): n is a, c, g, or t
  misc_feature (141)..(141): n is a, c, g, or t
  misc_feature (150)..(150): n is a, c, g, or t
  misc_feature (153)..(153): n is a, c, g, or t
aaagacctcagtgatcaaactattttttactatactgattttctgttattaacaacgatttaattgtcnnatgatgtaccatgattggncagtatagatttttcttttgtctttaggcaannnaaagatatanacttatgnctaatcatnggnaaatgtgatttttgagtataaaatgtgggctagctttaa

SEQ ID NO: 2118 - DNA, 139 bp, Homo sapiens; identical to SEQ ID NO: 1389

SEQ ID NO: 2119 - DNA, 276 bp, Homo sapiens; identical to SEQ ID NO: 1390

SEQ ID NO: 2120 - DNA, 140 bp, Homo sapiens; identical to SEQ ID NO: 1391

SEQ ID NO: 2121 - DNA, 237 bp, Homo sapiens; identical to SEQ ID NO: 1392

SEQ ID NO: 2122 - DNA, 211 bp, Homo sapiens; identical to SEQ ID NO: 758

SEQ ID NO: 2123 - DNA, 229 bp, Homo sapiens; identical to SEQ ID NO: 759

SEQ ID NO: 2124 - DNA, 126 bp, Homo sapiens; identical to SEQ ID NO: 760

SEQ ID NO: 2125 - DNA, 253 bp, Homo sapiens; identical to SEQ ID NO: 763

SEQ ID NO: 2126 - DNA, 244 bp, Homo sapiens; identical to SEQ ID NO: 764

SEQ ID NO: 2127 - DNA, 294 bp, Homo sapiens; identical to SEQ ID NO: 765

SEQ ID NO: 2128 - DNA, 232 bp, Homo sapiens; identical to SEQ ID NO: 766
  misc_feature (167)..(167): n is a, c, g, or t
  misc_feature (194)..(194): n is a, c, g, or t

SEQ ID NO: 2129 - DNA, 181 bp, Homo sapiens; identical to SEQ ID NO: 767
  misc_feature (150)..(150): n is a, c, g, or t

SEQ ID NO: 2130 - DNA, 150 bp, Homo sapiens
tcttcaaacccccaggttgtttctgccgtatctcatcaaggcaaaagaaatcccaagagccctttggcctgcactaataaacgccccaggcctgagggcatgcaaacattggaatcattttttaagccattaacacattagtgctgccct

SEQ ID NO: 2131 - DNA, 182 bp, Homo sapiens
ctctgtgacgggcagttcagataataccttcaccagatttacctgttttcagctgaagaatgtgagatgaagccttgaaaccctaaaagtgatatggtaactagggcaggtctttctgtacataaaagtgacttaataaacagtgaatttcatacaggtaaaccctattataccctcagttc

SEQ ID NO: 2132 - DNA, 74 bp, Homo sapiens
acaaaaacaaacataaagttggcacagaaaagggaccaagtttaaaaaagggttttaaatgtaatgagacttgc

SEQ ID NO: 2133 - DNA, 37 bp, Homo sapiens
atggagataataccttacagattattgcagattaata

SEQ ID NO: 2134 - DNA, 65 bp, Homo sapiens
attacagatgttagccaccgatcctggcccccccaaaaaaaggattttaagaaaaacttctcttg

SEQ ID NO: 2135 - DNA, 191 bp, Homo sapiens; identical to SEQ ID NO: 1428

SEQ ID NO: 2136 - DNA, 200 bp, Homo sapiens; identical to SEQ ID NO: 1429

SEQ ID NO: 2137 - DNA, 218 bp, Homo sapiens
aattgttggagttagagagtgaagaggagagaagccggaaaatccagggactcctgaagtcatgtgggaaacctgtcgaggacttcatccaggagctgctggcaaagcttcaaggcctccacaggcagcccgcctccgccagccaagcccctcccacgacggcagcctcagccccctccaggaccgggcccggactgctcacccctgaccctcttgca

SEQ ID NO: 2138 - DNA, 262 bp, Homo sapiens; identical to SEQ ID NO: 1434

SEQ ID NO: 2139 - DNA, 230 bp, Homo sapiens; identical to SEQ ID NO: 1435

SEQ ID NO: 2140 - DNA, 130 bp, Homo sapiens; identical to SEQ ID NO: 1436

SEQ ID NO: 2141 - DNA, 293 bp, Homo sapiens
  misc_feature (133)..(151): n is a, c, g, or t
  misc_feature (154)..(154): n is a, c, g, or t
atttgtcttattacccaagaggcaattacctgaatttggatgtctgaattataacttatgcaggaatagttctgtaaatacatttaaataaactgtaaagatatttaataaatatagtatttatactaaaaannnnnnnnnnnnnnnnnnnaanagtaactaaatgagacaccagcccttgacattgagtttgttggtcactatcaggtcctcatttccaagcctcctagtcattctagcactgattatatgctgctactttaactggctccagctgcttcactacatcagtt

SEQ ID NO: 2142 - DNA, 77 bp, Homo sapiens
atgagttattcatttgtaagccgttcagtaatttatctactattcctaaattggcataatgttagataatctatttt

SEQ ID NO: 2143 - DNA, 278 bp, Homo sapiens
gggcaagaattgagtttcacagtggaattggctttggatctggcctatagattagtgacataaaatattttctctattttcccctgttctttttgtgttatgcacttaattttatgactgccgggggggtcagctggagtgctgcttaacaagtatctctcctactctcagtggtcagaggctgtgttggacccatagtagaattttccaggtcacagacccaagcttccatgggttgttactgtgctgtaccacttggtgggtctgattctgaacct

SEQ ID NO: 2144 - DNA, 263 bp, Homo sapiens
ccactgttggaatttggtacaaaatatgttttgtctattgaaaacatacacggtaaatggtgttgttaggtaggttctgtccagttcttagggacttttttcacattatagcatttttaccctaaacatgatgttgagattattatatactgtattttcttctaaattaaccctaatgtttaaaaactcactttccccctttaattgaaggcattgttttgttagatgcagtaatgatgtttaccagagattattgtttccta

SEQ ID NO: 2145 - DNA, 223 bp, Homo sapiens
ctgtccagcggactgccacgggtctccccttcccccctcacttggagcctctctctttcagatgtcatcctcctgctctgtatctttcattttaacgggaacgtgaagcaggccactccttacatcgctgtgtatcctttctgaatctgagccagaagtgggaacggggatgttatttgcgaatggtatgcattgtgaagcaggctcctttaccagatgtgta

SEQ ID NO: 2146 - DNA, 276 bp, Homo sapiens
  misc_feature (60)..(60): n is a, c, g, or t
  misc_feature (179)..(180): n is a, c, g, or t
cacgatttttggagagcgggattactcaaagaaacccaccccggacaagtgcgcagcagnacgtgaaggccccgctggaggtggcacaggagcactgagccagggaatactgagagcactaactatgcactaacctagattttcattcccaccccccacccaacaccactaaagtcctnnccttcttttgtgttctgtggagagcactaatgatcacgtgtgttgatggaaaccatctgtgcttagtctctgacataggaagcttgcttcaggcaa

SEQ ID NO: 2147 - DNA, 258 bp, Homo sapiens
cagtgtagtgattcatcatgttcatacctgtatcaaaggttcaattttttttatcattcagtagtattccattgtataagtatattacaatttgtttatccattcacctgttgatgaatgttgggttgcttttgatttttgactgttgcaaataagttgctatgaatatttgtgtacgagcctttgtatggatatatttccctttttcttggaataaatatataggaatagaatggctgaatcacaagttaagtgtta

SEQ ID NO: 2148 - DNA, 196 bp, Homo sapiens
aattatagtaaagtaggccaggcgcggtggctgacacctataatcccagcaccatgggaggccgaggcaggcggatcacctgaggtcaggagttcaagaccagcctggccaacatggtgaaaccccaactttattaaaaatgcaaaaaaatagctgagcgtggtggtgcatgcctgtcaagtcccagctacacagg

SEQ ID NO: 2149 - DNA, 242 bp, Homo sapiens
caaatggcttcagtatggcttgttttttattttccagatggcttttttttttattttttgaagccccagtctttgattttacaggtaactttcaaaacatcatgatgctgccaaatgtacttttgtaaacttaaacattatgattcctgtattatttcagtgagagctacagtgtgatatttcagagtctattaaataaaaatgtgagtttgaattacaccatctgtgccaattacaaagca

SEQ ID NO: 2150 - DNA, 195 bp, Homo sapiens
cagtgtagtgattcatcatgttcatacctgtatcaaaggttcaattttttttatcattcagtagtattccattgtataagtatattacaatttgtttatccattcacctgttgatgaatgttgggttgcttttgatttttgactgttgcaaataagttgctatgaatatttgtgtacgagcctttgtatggatat

SEQ ID NO: 2151 - DNA, 243 bp, Homo sapiens
cagtgtaggtagcttcaggaaatggctcaggttaattctcaaaacacaaattgttgctggccaggcatggtgactcatgcctgtaatcccagcaatttgggagacagaggcggaaggatcacctgagcctaggagttcaagaccagcctcagcaacagcaggagccccaccccccgtctctacaaaaaaatttaaaaattaactgggcatggtggctgaggtggaagaatggaagaatcactt

SEQ ID NO: 2152 - DNA, 224 bp, Homo sapiens; identical to SEQ ID NO: 1437

SEQ ID NO: 2153 - DNA, 196 bp, Homo sapiens; identical to SEQ ID NO: 1438

SEQ ID NO: 2154 - DNA, 252 bp, Homo sapiens
tcctatgtgctgcttgcacagaggcctttggcttttgacccaggagggccgcgaggctggagctgccctgtctttcattgagccttagcatttccctttcaggcttcctttcaagctcaaggaactcacccccagataagaagctggtgccttttgtttctttcatttcagaaacggactttttcatcatgctttcctatggtgggtatgaggggccagctgataccaaccaactggcctgtatctatctat

SEQ ID NO: 2155 - DNA, 200 bp, Homo sapiens
gatgtttatggtcatgttagctatcagagagctattggagtgagagctgaggtgtccttaaccactttttctctcctagattcattttcattatttatgctaggattttcttatggttgacatttgatgacaggaagcaatcatgactcttcaagtgagctcacagaaacctttcatgttgtctgtttccaaaatggatt

SEQ ID NO: 2156 - DNA, 200 bp, Homo sapiens; identical to SEQ ID NO: 2155

SEQ ID NO: 2157 - DNA, 210 bp, Homo sapiens
gggtgccatgttgctgcggtctccctggagtccaccttcctgctggctcagctcactgaattttgggggactggggcatccagggagctgtcaggacgtcagcaggttagctgggccatggcaggaacgctaccattgtttgggcctaatgccagtgtagaggaagaaaaacagtttttcttccaactctcctaagctcttagttggaac

SEQ ID NO: 2158 - DNA, 294 bp, Homo sapiens
agtatttattgatccaggcaaagtaattaattaatcatgcttgggcttactttttcagtttgtaaggttaagcatatgtgcatgcatgcgtgtgtatataaatgccttttccatatcttaaatgtccctgatgaggagagcagtcatcaattaaatatataagctcttaaaatgagaatggaagtgtcagtatagacccattgtacttaagtgctgatgactgttagccagtttacaactttttaccatcgatgtacacatttgatatttgtgcagtaaatagactgtacctat

SEQ ID NO: 2159 - DNA, 149 bp, Homo sapiens
ggttgagcgctcacgcgaacgcctaagtgaccagaacgactggtgtgaagccgtgatctgactctgtggagcctgggactggtttcagcgagagcctctgtactgctctgtagtctctgctaggacatggacgaaaagggacgcagccg

SEQ ID NO: 2160 - DNA, 198 bp, Homo sapiens
gtatctgcctattttcttgctaatcccagaacctttccttttgctttttttaaggacatttgggaagttcctggtgtaggacccttctccctgggataagaaacctgcctgtaaacgctctgtaaatactcccttccacccatcccagcccctgggcagccgggcagaagggaatccaggctatggacctcccaagtc

SEQ ID NO: 2161 - DNA, 138 bp, Homo sapiens
  misc_feature (109)..(109): n is a, c, g, or t
ccaggctctttctgcagtcataccgcggacccaatgggcgccctgcacacccgtttctggggccgtcagacttggatacatcgtaaactccgcctccacggaacgtctngccttgcgagcaagctcggaatccagttc

SEQ ID NO: 2162 - DNA, 259 bp, Homo sapiens; identical to SEQ ID NO: 1449

SEQ ID NO: 2163 - DNA, 48 bp, Homo sapiens
gcaccctcagggtcttaaggtcttcatgccctatcacaaatacctctt

SEQ ID NO: 2164 - DNA, 101 bp, Homo sapiens
tggacccgcacgtcctgttcaaaagcagactcgggaactgcctgaatgtggtttgggacacgagacctcatcatattgatgagcgaacaaacaagaacatt

SEQ ID NO: 2165 - DNA, 236 bp, Homo sapiens
tagagctaatgggacctgctggcaggtaggaggtggtgaggtgaaggggaggactgacgtgcagaatgcctgggggcaccacagtgttcccggggctgcttctagagccacgagtagaccccaagagactgtagggagccccggagccacactcttgacctggacatgctgctctggggagagcatccatggcttccatgatccctgagaggcatgggtatcgtcaaaagagcccc

SEQ ID NO: 2166 - DNA, 105 bp, Homo sapiens
cagggctccccaactataggcctgggacccccgcccagcttggggggctgctcgtacgagtgtagacactgggcccattggacgtgctgttaactactatcttca

SEQ ID NO: 2167 - DNA, 234 bp, Homo sapiens
cacagggcctctttgggacttcagaggaaatctcccagtcccactctcggagggttaagagaaggcctcctgcagctgtgccgtccacacctctaggtcgccagagccctgcccccagcccccagcaagcctgagcccgggaagaaccagaggccctcccgagagacccagtcacacgtctctgctttaagccttagccagctagtgacgagtacaacgagataacgcccatgt

SEQ ID NO: 2168 - DNA, 251 bp, Homo sapiens
agggctggggactatgcaattccaaagggaatgaagcgggggagatcctgaccctacccttgtgagagtcaaggcacagagtcggtctcccatgagagccgccccccaaacccccctccctgcacccagccctcaacaccaccctcacacactggctccagctgccagctcgtccgtgaccctcttagtgtcaaaatggacaaaagtctatggaagtttttaagctgattttctgacaaagtggcaggttt

SEQ ID NO: 2169 - DNA, 270 bp, Homo sapiens
aactcaggctcagctgagggatgctgtccagagcctgcagctttctccaaggacgcgggggtcttggagtcaaccccagcccctcaaagcaccctgcctcaatggagacaccacctgagctgcccatcctgcctcatcacacgtggtctgggagcagagagatagccatcttagggggggtgtctgactttgccttagccctacttggcctacagtggggagtggagctgctggtcccaaccactctggcagtatgaagttgcccagtaa

SEQ ID NO: 2170 - DNA, 155 bp, Homo sapiens
ccctgcagatcgcagacctgtttccaggctgatgtttttggtgtgtaattgctagcgtttttgaagggttttcccaattgttttagccttgtgaagtatttttaattataacttgcctttcagcgatggtacatgacttgattcaacgtttggtt

SEQ ID NO: 2171 - DNA, 297 bp, Homo sapiens
cgaagtgcccgcctacatgagaaaaaggagcattttacagcagtaaggatttatagatttttttttttcttttttactagaaagattcatattagaaaactttgggtaaagaaaaaaaaacttcatgtttgatattttttcatgagattggctttttaaatcaaagatgtaaataaatccagccactgtggtgcccgcctgtaatcccactactttgggatagcagatggagacaggaggattacttgagcctaggagtgcaagaacagcccaggcaacataatgatccccagctca

SEQ ID NO: 2172 - DNA, 251 bp, Homo sapiens
tgtttttgttggatagcttttaattacatttcagagaggtgtaattttgggtagatgctcattacatttttgaaaggtttatgattccaaaataaagatttatatgactggtgatactggctttacagaaatttcagagaactaatttttaaaatctttagcatttaaaactttttttgttttgttttttgacatattctgacaaagagcagcaaaccactgctgtgtggcattcttggagtgtgctgtga

SEQ ID NO: 2173 - DNA, 80 bp, Homo sapiens
gggcatcatggcacacacctgtggtcccagctacccggggggctgaggtgggaggattggttgagcccaagaagttgagg

SEQ ID NO: 2174 - DNA, 174 bp, Homo sapiens
aaaaaaatatgccaggtgcagtggttcatgcctgtaatcccagcactttgggaggccaaggtgggtggatcacctgaggtcaggagttcaagaccagcccggccaacatggtgaaacgctgtctgtacgaaaaatacaaaaaaattagttgggtgcggtagcgtgtgcctgtaa

SEQ ID NO: 2175 - DNA, 194 bp, Homo sapiens
gacacaggcaacgtgaccccaagcgacagccagctgatgcttgcttctccgagcccggcggtcagcagccggaagtagcccgcccgggggcggggaaaggtgccttaaggaggagctaggggcgtgcggccaattgcaagcgactgtcctagcgaagagggcggaagaggagagatccagttccggacgcggcc

SEQ ID NO: 2176 - DNA, 286 bp, Homo sapiens
gcagattagagagcgtttggatttatagatactatcctctacagtagtggtcttcaatgtgtgatccagggaccccctgcggggccccaaggccctctcagaagctccaagagataaaaaccagttccataacaatactgaggcattgtttcccctttttactacggtgaccatttgtattaatggtgcaaagcattggtgggtaaaactgctggcaccttagcaggaagcaggacggtaatgccaagctgtaccagcagtcatggtattcttcattactgtgcag

SEQ ID NO: 2177 - DNA, 222 bp, Homo sapiens
  misc_feature (31)..(31): n is a, c, g, or t
  misc_feature (124)..(124): n is a, c, g, or t
tttagccactgagggagaaatgcatccccangtctgaggggatatcccttttcttcaaacaatccctgggttgtttgtctacagtagaactctctttaataaaaaaaaaaaatgaaatgaaatnaaaataaagtaaaagaacgcccatcttcagtataccaagcagcatgcagggcataatcgcctcaattcttggtatctggcacaatgttcagttggcag

SEQ ID NO: 2178 - DNA, 149 bp, Homo sapiens
gaaggcaggcatactgagcgcgaatgcttttgttgttggatttcacgagctttccgcctagaatgttggttgtgttttcaggagatgattaacactttctgttttagttaatccttaaaataagtagttacaggatagtcccttggaag

SEQ ID NO: 2179 - DNA, 155 bp, Homo sapiens; identical to SEQ ID NO: 121

SEQ ID NO: 2180 - DNA, 80 bp, Homo sapiens
gatcacctgagtgtaggaggtgaaagcctcaccgaactatgactgaaccactgcactccagcgtgggcacttggcaccag

SEQ ID NO: 2181 - DNA, 53 bp, Homo sapiens
atgatgtgtgtgcgtcggaccgcttctaggctactaagtgtcaatggaaaaga

SEQ ID NO: 2182 - DNA, 261 bp, Homo sapiens
gatctttattagaggatcgtccaacttttcacttaccttgggttttcttttcaattcactcttacactagtctgcttatttccagctgtttattttattgagtcctgaatttaaaaaaaaaatattttgattcattttgtaaatacaagctgtacaaaaaagagagatttaatgttgtcttttaaatactccaattttcattctaatatgaatgttgttatattgtacttagaaactgtacctttaatattacattacctt

SEQ ID NO: 2183 - DNA, 143 bp, Homo sapiens
catccttggctgagcttagcaacaaggggggagggagtgaggaggggtgggaggaaaatgggctcccccgttatcatgtcagtgcaatcactgggaattatggttgaggattaagagtcacttggggataattcagccaggct

SEQ ID NO: 2184 - DNA, 203 bp, Homo sapiens
ctgagttgagaggaagatgtgagcacaagagttcaagaccagcctgagcaacacagcaagactctgtctctacaaaaaaattaaaaataaaaaaaactggctaggcatggtggtgtttgcctgaagtcccaactactcggaaggctgaagcaggaggattgcttgagcccaggagttcaaggctcctggtgagctatgatggt

SEQ ID NO: 2185 - DNA, 280 bp, Homo sapiens
tttgagaaggtaaaaaagtgggccaggtgcggtggctcaagcttgtaatcccagcactttggaacgccaaggcaggtggatcacgagctcaagagattgagaccagcctggccaacatggtgaaaccctgtctttactaaaaacacaaaaattagccgggcgtggtggcgggcgcctgtagtcccagctactccagaggctgaggcaggagaatcgcttgaacccgggagggggaggttgcagtgagccgagattgtgtctcagtgctccagcctggcaa

SEQ ID NO: 2186 - DNA, 117 bp, Homo sapiens; identical to SEQ ID NO: 30

SEQ ID NO: 2187 - DNA, 293 bp, Homo sapiens
cttgagcatagtctaatcacttagcaaaataaatgggttctctttcctgctgatatgaaatgacatttaacccaccccgagagattctagagaaagaggacttttgttaaatgttactgatcccagggtcctagaaaatcttcaaggactttatattttaaaatgtagttaattctagaatcttagagggaccttacgccaactgagaaccattggttaaatagccaattacctttatgttagcccttgatatcacataaccccataaatccttaacaacaaatacgttctgt

SEQ ID NO: 2188 - DNA, 201 bp, Homo sapiens
tctagtgcaatatgtacatagagcacttgcgggtgtaccttgatccctcagggaaaaatacatatttgtacagttttttggggtttttttgttttttggttttttttgttttgccttttgtttttggctaaggaatgtcgatcgaatcacttgttattgttgaggggcagccagataataatcctaaagccactgtttcca

SEQ ID NO: 2189 - DNA, 163 bp, Homo sapiens
gaaggcaggcatactgagcgcgaatgcttttgttgttggatttcacgagctttccgcctagaatgttggttgtgttttcaggagatgattaacactttctgttttagttaatccttaaaataagtagttacaggatagtcccttggaagaaaacgtcatttta

SEQ ID NO: 2190 - DNA, 256 bp, Homo sapiens
ttatttgtcacttcatggagtcaagtgacctttcccagggcacatgggcagacttttcccagtggctgttcctgggcttcagagtacacccaggggaaaattatctgttagttactttctccctcttcttgacaccttctgagttccaacgagtcagaagataatcataatcagaataacatctcaaaagagaagctaattgcagttttttcttagttgcaaaagaaatacatggtcactgtagaaatcatgaaac

SEQ ID NO: 2191 - DNA, 247 bp, Homo sapiens
gctcttcaacacgtcctacagaagaatcaccgagaagatggaatactaacaaagttaatatgcaaggtgtctacattaagagccttatgtggacgacatacagaaaagctaatggcatttaaagcaatatacccagacattgtgcgacttcattttcctccattatacaaggagttgttcacttcagaatttgagccagcaatgcaaattgatgggtaaatgttatcacctaagcacttctagaatg

SEQ ID NO: 2192 - DNA, 127 bp, Homo sapiens; identical to SEQ ID NO: 33

SEQ ID NO: 2193 - DNA, 153 bp, Homo sapiens
gagaaattcagcaggaataactggatttcatcgggtaaattccacaaatattgattaagtattccccaccccaccctgttttggtgagttttcagtgtggccacaaatcacataagaaacttgttaaactgaaaatttacagcctagacaaga

SEQ ID NO: 2194 - DNA, 220 bp, Homo sapiens
aggccactgaacttcaaggagtttatgtcagggatcggctgcagggctgaggagagagggttgcagcattcaccttcctcagctcgtttgctatgtcctcctggaggagagagaaattcagcaggaataactggatttcatcgggtaaattccacaaatattgattaagtattccccaccccaccctgttttggtgagttttcagtgtggccacaaatca

SEQ ID NO: 2195 - DNA, 212 bp, Homo sapiens
gatgactattttagaccacggatacgtgctacctatgagatatgtttgggcattcttttaaggcaagcagtggagatatttatggcacaatacagggacaacaaggatgtatcccccaatttttcctaattacactttaaatttttttatttcatgtgaaacgtttgggggaaaacatctgtattacatcaaagtagtttatcttgtgcctc

SEQ ID NO: 2196 - DNA, 102 bp, Homo sapiens
aaaaagatttattctatacaaagccttgtctggaccactttagagagacttctatttttttaacccttctataaatatttgatggcacttgaaatattcctg

SEQ ID NO: 2197 - DNA, 203 bp, Homo sapiens
ccctggtaaggatttaggtggatggatcctgtgggagccctgaactgggttttagaggtgagcaggtgagcaagtaaggaagccagaccaagagtatttcaggcagaggcaagaacctaggtaaaaagagaaaccaaatgtaagctcaacgtctttctgtggagcagacacctaagaaattgcccaattcattcccaagcccc

SEQ ID NO: 2198 - DNA, 181 bp, Homo sapiens
ctggaatcacctcaatcaaataggcttcatttttttcctagtcagttgctttttttaatttgatatattgacacaaacataggaaatatgggaaagaaaatgaataagaaagaaagagtttcagtgacaggaaggaagggccaaagacaaagttcaagagggccttaaaagtcaacgaggg

SEQ ID NO: 2199 - DNA, 200 bp, Homo sapiens
ctggaatcacctcaatcaaataggcttcatttttttcctagtcagttgctttttttaatttgatatattgacacaaacataggaaatatgggaaagaaaatgaataagaaagaaagagtttcagtgacaggaaggaagggccaaagacaaagttcaagagggccttaaaagtcaacgagggggtgcggcatgatggctca

SEQ ID NO: 2200 - DNA, 192 bp, Homo sapiens
cagcctccagatggatgagtttttacttgtctgtaatccatccatccatcctttcattcattttatttattcgatgaatatttttaagtgctttgtgccaggtactgtgacacgttcaggggatgaaatggcaaaaaaagaactgtatttgtcctcatagggtgtacggtctacctagtgtacacatcacat

SEQ ID NO: 2201 - DNA, 249 bp, Homo sapiens
gatgactattttagaccacggatacgtgctacctatgagatatgtttgggcattcttttaaggcaagcagtggagatatttatggcacaatacagggacaacaaggatgtatcccccaatttttcctaattacactttaaatttttttatttcatgtgaaacgtttgggggaaaacatctgtattacatcaaagtagtttatcttgtgcctcagttgattcttgaaatctgctcttgggtttgtctgtc

SEQ ID NO: 2202 - DNA, 238 bp, Homo sapiens
ttagtgtcattgtttaatcacagacttagtgtttgaaaactgtgttttaaaaacagaaacagattgatgggtaacaggtaaaatatgacatgtatagcttacatgttattattaaattttctttgtatacatttcaaaatctgggtatacttataatccattagaagtaatggttatggactaaaaagatatgttctttagtatgttatatatactcatattacatagcagtatgttt

SEQ ID NO: 2203 - DNA, 179 bp, Homo sapiens
agtggtggtttccatttaaaccaagtttttcattttttcacctttttttctttaagaatttggattcgtagacattgacatcccgaagaactgtcaaggaagcaagatatgcttttttcatctgcaaaagaaatactaacaacaattttcttatacagtttggcagaaagatgttaaca

SEQ ID NO: 2204 - DNA, 187 bp, Homo sapiens
aagtggattccataactctggcacaaggaaatcaagatgaaaagcactcattaaggaattaaagttacaagttttatcttaataatatgtaatctagaaaagctttcacattgaagatcaactcttgtacaaaattaacaattctgttattgcataagtaatctaattgtcttcaataaggtcacac

SEQ ID NO: 2205 - DNA, 248 bp, Homo sapiens
gataaactcatcaaggtgaatcctgaaattttcacaaacaaccaaagaaaccaagatcttgctaacctcatcaaagtaaatcctgcagtaatcagaaacaatcagagccaagacttggacaatcttattaaagtgaaaccttcagctcttagaaacactaatcgagaccagaacctggaaaatttaattgaagtaaattctcatgtgtctgaaaacaagaatggaagctctaacactggagccaagca

SEQ ID NO: 2206 - DNA, 285 bp, Homo sapiens
tatatatcaaactcggtctccatcccaggccagctgaccctcagagccagcaatgctctgtgcttcctccctgcgtcacggcttggcaagagctgcctctgctgagcagtgtgtgtgatggagacggaggccgctgaaggccgagtgcttgcaggcttgtgaactgccatcgaacacaatccaaactctggaaatgttcctgaccacctaagccctcaacaacgtaatgcctgtatgtgctgtttttcagtaaactccttgttcatgtcaataaagtatccctga

SEQ ID NO: 2207 - DNA, 216 bp, Homo sapiens
gtgggccctgtcattcgtggttgatttcaatacactcaagtgccattcatcctttaagaaaaacatctggatatcaaggtggaaatggcccatttaatgattgattatatcattttgtggatatagttataatctgatgggcctggctgggagtggaagaagggaagccttttgcaaatagtagagtgtcagttgcaggtgccaatgactaacttt

SEQ ID NO: 2208 - DNA, 269 bp, Homo sapiens; identical to SEQ ID NO: 1551

SEQ ID NO: 2209 - DNA, 271 bp, Homo sapiens; identical to SEQ ID NO: 1552
  misc_feature (181)..(181): n is a, c, g, or t
  misc_feature (184)..(184): n is a, c, g, or t

SEQ ID NO: 2210 - DNA, 264 bp, Homo sapiens; identical to SEQ ID NO: 1553

SEQ ID NO: 2211 - DNA, 197 bp, Homo sapiens; identical to SEQ ID NO: 1554

SEQ ID NO: 2212 - DNA, 72 bp, Homo sapiens
cacctctgtgtccaagtggattgagcatatatgcctaggaggagatagactgttaatcgttggattttgatt

SEQ ID NO: 2213 - DNA, 170 bp, Homo sapiens
cacacacatgccttgatcatagcacttgcctgcgcttcttcagagtcattaatttgcttctcggcttccccactggactgtgagctgcctgaggtcagggattgcgctttggatggtttccagcctgagcctggtgcttgaacagacgtgtgcaataaatgctcgttaaa

SEQ ID NO: 2214 - DNA, 244 bp, Homo sapiens; identical to SEQ ID NO: 832

SEQ ID NO: 2215 - DNA, 269 bp, Homo sapiens; identical to SEQ ID NO: 833

SEQ ID NO: 2216 - DNA, 123 bp, Homo sapiens; identical to SEQ ID NO: 834

SEQ ID NO: 2217 - DNA, 132 bp, Homo sapiens; identical to SEQ ID NO: 835

SEQ ID NO: 2218 - DNA, 104 bp, Homo sapiens
atctatttcataactcggacaatttctgggtggtgactgagtacccctttagtgagtacccctttagtgctatatttgtgccattcattatctggttcatattt

SEQ ID NO: 2219 - DNA, 216 bp, Homo sapiens; identical to SEQ ID NO: 836

SEQ ID NO: 2220 - DNA, 208 bp, Homo sapiens; identical to SEQ ID NO: 837

SEQ ID NO: 2221 - DNA, 86 bp, Homo sapiens; identical to SEQ ID NO: 838

SEQ ID NO: 2222 - DNA, 78 bp, Homo sapiens; identical to SEQ ID NO: 839

SEQ ID NO: 2223 - DNA, 78 bp, Homo sapiens
tgccttagctggattaatgatgagatataaccttgactgaagctgatgatgagtttgtataattaagcaggattactc

SEQ ID NO: 2224 - DNA, 59 bp, Homo sapiens
aaagtacctattggtgatgaagtactctgtacaacaaacccgtgacaagagtttcccta

SEQ ID NO: 2225 - DNA, 129 bp, Homo sapiens
ttttttaaacctgctctcattcctattaacactaagatcttagatttttatagtgataaatgggttgacatcattgtcatttgtaattgtaaagcctcaaaagacaactgttcctactatgtaattata

SEQ ID NO: 2226 - DNA, 202 bp, Homo sapiens
tgccaagacttggcctgcagaatgtcaggaatgtgaattaaaagctgctgtttccagacgctttttattctgagcaccttcactaccttgtatccagttcatctgggaactcctttttgcattttagaaaatggaaagaggcaggaaattatgataaactcatgtttaacagaaagagtttcactgactaaatgtatgtaat

SEQ ID NO: 2227 - DNA, 260 bp, Homo sapiens
catcaaaactttgttattggcagggcacgatggctcaggtctgtaatcccagcattttgggaggctgaggcaggtggatcacctgaggtcaggagttcgagaccagtctgaccaacacagtgaaaccccgtctttactaaaaatacaaaaattagccgggcttggtggtgcacaactataatcccagctactcaggaggctgaggcaggagaatcactggaacctgagaggcagaagctacagtgtaccaagattgcacc

SEQ ID NO: 2228 - DNA, 231 bp, Homo sapiens
gaaacaacgtcgtcctaggattgtattcagaaaagattgaacattatgtatgttccttttatttgattatgcatgaatgagataggagaaaacaatggaaggatccacactgatctgttgacttcactagctgggagaccagagacagaatagggtaggaaaagagagctttggggttatatacatttgcattcattggtcttcttatgacaagcctatattgctttctta

SEQ ID NO: 2229 - DNA, 71 bp, Homo sapiens
gttgcttctagtgcagtttttttcttgtctataaagcatttaagctgcctgtacacaactcactcctttta

SEQ ID NO: 2230 - DNA, 166 bp, Homo sapiens
gtttccaaattatggcaaattcatgtagagagagaaaagtaactgttttggttttgctcacaaaagtctactttacctaagggctgtcagatataagtaacttaaaagaaagagaagttttcttgacttttgaaaacaaaatatgaaaagaatcggcaatgtttca

SEQ ID NO: 2231 - DNA, 194 bp, Homo sapiens; identical to SEQ ID NO: 842

SEQ ID NO: 2232 - DNA, 238 bp, Homo sapiens; identical to SEQ ID NO: 843

SEQ ID NO: 2233 - DNA, 130 bp, Homo sapiens; identical to SEQ ID NO: 844

SEQ ID NO: 2234 - DNA, 255 bp, Homo sapiens; identical to SEQ ID NO: 845

SEQ ID NO: 2235 - DNA, 262 bp, Homo sapiens
ggtggtgggatacaactaggtttcaagcaacttatgtcaggcctaaaaataaatgctgaagcaacaactatataacaaatttatacaagtggtattgaaggtgagagtaaagcagggtcttctgcttttagctccttattctttctacctgactctactttctttatacaatactagaagaatcaaggtctaaaaaataaatctagtatgaaggacctgagttgctttcttagccttgaattagtttggatcttactattta

SEQ ID NO: 2236 - DNA, 203 bp, Homo sapiens
tagttttcatagctgtagtccattctaataatttctgatcttctagtggctacttaattagacattatttgaagctgtctgaagaatgcactttatgaattaaaaaactgaattgcctgacctcgttatcacatgagcttatattttgggaacacatagaactgatggaggcttttcctaaggccaaggataatgtactagtt

SEQ ID NO: 2237 - DNA, 267 bp, Homo sapiens
aattttcagtgtgtaagctaaacaaaaactaaaactaagaattctcaaaaaaacttgttcaaaacagggaaagactgatgaaaagtaaaatggactacttttgtaacttacctgtttgttaggaaatggaatggtctctttgatttaaaatgaataaaaatagattattacgtcttttgtattgagactgtattgttatgagcctaggaaatttgggaacatgattgtattgtattaaaattcgaagtgattattatcagcttaatt

SEQ ID NO: 2238 - DNA, 233 bp, Homo sapiens
taatgcaggagaagctacccaccatgcggtggattctgcggtcaatgttggcgtaactgcctacaatattaacaacattggtatcaaagcaatggtgaagaaaactgcaacacaaacaggacacactctccttgaggactatcagatagttgataattctcagagggaaaatcaagaaggagcagcaaatgtcaacgtgagaggggagaaggatgagcagacgaaggaagtaa

SEQ ID NO: 2239 - DNA, 242 bp, Homo sapiens
gtattctgtgtgagtataccacaatttaagtgttcattttcctatcagttgacatttgtttttagtttttgttggtagaaacagtacactcaaaacatccttgactgtcccctggtacacatatgcaagagactttatgcgtaagagtggagttgttggcttgtcaagttttgcaaaataatgccaggtattttccaaaatgatgatattctcttgagtattacttccctttgcaatgtttt

SEQ ID NO: 2240 - DNA, 270 bp, Homo sapiens; identical to SEQ ID NO: 1595

SEQ ID NO: 2241 - DNA, 280 bp, Homo sapiens; identical to SEQ ID NO: 1596

SEQ ID NO: 2242 - DNA, 89 bp, Homo sapiens; identical to SEQ ID NO: 1597

SEQ ID NO: 2243 - DNA, 259 bp, Homo sapiens; identical to SEQ ID NO: 846

SEQ ID NO: 2244 - DNA, 204 bp, Homo sapiens; identical to SEQ ID NO: 847

SEQ ID NO: 2245 - DNA, 234 bp, Homo sapiens; identical to SEQ ID NO: 848
  misc_feature (156)..(157): n is a, c, g, or t
  misc_feature (159)..(159): n is a, c, g, or t
  misc_feature (175)..(178): n is a, c, g, or t
  misc_feature (180)..(185): n is a, c, g, or t
  misc_feature (188)..(190): n is a, c, g, or t

SEQ ID NO: 2246 - DNA, 259 bp, Homo sapiens; identical to SEQ ID NO: 849

SEQ ID NO: 2247 - DNA, 86 bp, Homo sapiens; identical to SEQ ID NO: 850

SEQ ID NO: 2248 - DNA, 45 bp, Homo sapiens
cttagccaggacgaggtgaaagctgagaccatccgcagcctgagg

SEQ ID NO: 2249 - DNA, 244 bp, Homo sapiens
ttgcacacggaaggccagtggtctccgcttccccacctttgctgtggtgtctgtgtctgtgactgacgtggcctccttttgtgccgtgcttggcatatgtggtcctcgttcatcgtgccgcctgtggtgatgcgtgcagtgacgctgtttatgtggtccgcacctccccctgaccttcactccttgcctggactcaccccacccctcagcggctctgaaccccaagagaagagtcgggaaacaa

SEQ ID NO: 2250 - DNA, 263 bp, Homo sapiens
  misc_feature (28)..(28): n is a, c, g, or t
tcagcgcagcgccaagagactgcaggtnagtagctatgcaaggagtccatctctgacgaggttttccgacctctgaatacctcctcgttgtggttgtggtacccttgtgttaaaattttattcccccaaaccatggcgggggtgtacacgaaccggatgtcagcggcatcccctaaggcttggaaccctttatacatcttggtcatcttgatctcataacgctggtataaggtggtctggttgacttctggtgtccccacgaa

SEQ ID NO: 2251 - DNA, 230 bp, Homo sapiens
ggagaccagttattcagggtccatttttcttggatgtaaaggagtcctgggtaaaatgtggctgtaacctaaaccaactagtccttgtgatttgtttctgccctctgtgtttcctgttgtcaaatgctaagtgtgtgttttgcagtcatgaactaaagcacaaaaagatgcatgagacattgtagtcatatgtctggtgtgacactttggagcaaaaaccttgcagtggt

SEQ ID NO: 2252 - DNA, 263 bp, Homo sapiens; identical to SEQ ID NO: 854

SEQ ID NO: 2253 - DNA, 299 bp, Homo sapiens; identical to SEQ ID NO: 855

SEQ ID NO: 2254 - DNA, 69 bp, Homo sapiens; identical to SEQ ID NO: 856

SEQ ID NO: 2255 - DNA, 237 bp, Homo sapiens; identical to SEQ ID NO: 857

SEQ ID NO: 2256 - DNA, 244 bp, Homo sapiens
  misc_feature (107)..(107): n is a, c, g, or t
  misc_feature (111)..(115): n is a, c, g, or t
  misc_feature (129)..(129): n is a, c, g, or t
  misc_feature (141)..(141): n is a, c, g, or t
  misc_feature (147)..(147): n is a, c, g, or t
  misc_feature (212)..(212): n is a, c, g, or t
cagccttaaggttgattccaaagatagttctcataactccacaaactctgaatttgcagctgaagctgagggtcagaatgatacaatggaggaacccaacaaggtcnagannnnnaagagaaacccagngaggagcccctnggggancgaaggactgtcattgacaaatgctctccacccctagagttcttggatgactctgactctcattntagaaatccaaaagcataaagatagggaggtg

SEQ ID NO: 2257 - DNA, 286 bp, Homo sapiens
tagagagctgattggaacacagaaaaccaggacaggatgttttcctccaagcgggtcataaggcttcagcttctgggtggtgggtggggtggggtgggcatggaatgaggggtatggggactgcctgtaatagcactgggattttgcctcccagccaaaatgctccagggtaggcagcaaagaagaaagagtgcgatatgagggtacagtgagtttggcagtccaaattctgttctctgcagcctgtttttgagtagttggtgaataaagtcacccgcctacttgt

SEQ ID NO: 2258 - DNA, 221 bp, Homo sapiens
aaagcggagatgacatggaagtctccaagcctgtgccatccacctgccaaggaaaagcacaaggtgctatctacttttctctctaggatttagattatcatttatgtgctgttgcacagtgaaacctcacctgtgtgggcgtgaaagctgattggcattgtttttgattcagctttttggatggctaattgttttcactgtgctgtgggaatgcctctgta

SEQ ID NO: 2259 - DNA, 32 bp, Homo sapiens; identical to SEQ ID NO: 1607

SEQ ID NO: 2260 - DNA, 189 bp, Homo sapiens; identical to SEQ ID NO: 1608

SEQ ID NO: 2261 - DNA, 139 bp, Homo sapiens; identical to SEQ ID NO: 1609

SEQ ID NO: 2262 - DNA, 123 bp, Homo sapiens
gccccggactccctcgagagaatgtgctagagacagcccctgtcttcttggcgtggtttatatgtccgggatctggatcagattctgggggctcagaaacgtcggttgcattgagctactggg

SEQ ID NO: 2263 - DNA, 196 bp, Homo sapiens
  misc_feature (85)..(86): n is a, c, g, or t
tggcctagggtgacacagctaagatttgtacctagagatttctgagtgttgacttctctcctgcccccacctatctccccccccnnaaaaaaaaacacaacaacaacaacaacagaacataccagggattcatggcttgcccaatgttggagggggagaagagaggagagggatgagataagctcctcccacccgg

SEQ ID NO: 2264 - DNA, 165 bp, Homo sapiens
gcagaggctgcggtttgactttttaatttttcttttgttatttgtatttgctagtctctgatttcctcaaaacgaagtggaatttactactgttgtcagtatcggtgttttgaattggtgcctgcctatagagatatattcacagttcaaaagtcaggtgctgag

SEQ ID NO: 2265 - DNA, 249 bp, Homo sapiens
gtacatagctctgtgtaaatagaattgcaactgtcaggttttgtgttcttgttttcctttagttgggtttatttccaggtcacagaattgctgttaacactagaaaacacacttcctgcaccaacaccaataccctttcaaaagagttgtctgcaacatttttgttttcttttttaatgtccaaaagtgggggaaagtgctatttcctattttcaccaaaattggggaaggagtgccactttccagctc

SEQ ID NO: 2266 - DNA, 111 bp, Homo sapiens
ctgatttcctcaaaacgaagtggaatttactactgttgtcagtatcggtgttttgaattggtgcctgcctatagagatatattcacagttcaaaagtcaggtgctgagaga

SEQ ID NO: 2267 - DNA, 158 bp, Homo sapiens; identical to SEQ ID NO: 866
  misc_feature (119)..(119): n is a, c, g, or t

SEQ ID NO: 2268 - DNA, 217 bp, Homo sapiens; identical to SEQ ID NO: 867

SEQ ID NO: 2269 - DNA, 170 bp, Homo sapiens; identical to SEQ ID NO: 868

SEQ ID NO: 2270 - DNA, 226 bp, Homo sapiens; identical to SEQ ID NO: 869

SEQ ID NO: 2271 - DNA, 33 bp, Homo sapiens; identical to SEQ ID NO: 870

SEQ ID NO: 2272 - DNA, 281 bp, Homo sapiens; identical to SEQ ID NO: 871

SEQ ID NO: 2273 - DNA, 296 bp, Homo sapiens; identical to SEQ ID NO: 872
  misc_feature (58)..(58): n is a, c, g, or t
  misc_feature (65)..(65): n is a, c, g, or t
  misc_feature (68)..(68): n is a, c, g, or t
  misc_feature (84)..(84): n is a, c, g, or t
  misc_feature (89)..(89): n is a, c, g, or t
  misc_feature (96)..(96): n is a, c, g, or t
  misc_feature (115)..(115): n is a, c, g, or t
  misc_feature (247)..(247): n is a, c, g, or t

SEQ ID NO: 2274 - DNA, 215 bp, Homo sapiens; identical to SEQ ID NO: 873
  misc_feature (159)..(159): n is a, c, g, or t

SEQ ID NO: 2275 - DNA, 268 bp, Homo sapiens; identical to SEQ ID NO: 874

SEQ ID NO: 2276 - DNA, 230 bp, Homo sapiens; identical to SEQ ID NO: 875

SEQ ID NO: 2277 - DNA, 114 bp, Homo sapiens; identical to SEQ ID NO: 876

SEQ ID NO: 2278 - DNA, 145 bp, Homo sapiens; identical to SEQ ID NO: 1651

SEQ ID NO: 2279 - DNA, 97 bp, Homo sapiens; identical to SEQ ID NO: 13

SEQ ID NO: 2280 - DNA, 120 bp, Homo sapiens; identical to SEQ ID NO: 1653

SEQ ID NO: 2281 - DNA, 277 bp, Homo sapiens; identical to SEQ ID NO: 1655

SEQ ID NO: 2282 - DNA, 235 bp, Homo sapiens; identical to SEQ ID NO: 881
  misc_feature (113)..(115): n is a, c, g, or t
  misc_feature (118)..(128): n is a, c, g, or t

SEQ ID NO: 2283 - DNA, 241 bp, Homo sapiens; identical to SEQ ID NO: 1661

SEQ ID NO: 2284 - DNA, 179 bp, Homo sapiens; identical to SEQ ID NO: 1662

SEQ ID NO: 2285 - DNA, 237 bp, Homo sapiens; identical to SEQ ID NO: 882

SEQ ID NO: 2286 - DNA, 225 bp, Homo sapiens; identical to SEQ ID NO: 883

SEQ ID NO: 2287 - DNA, 187 bp, Homo sapiens
gcagctctggctccagttcccgaggtttgttgtctcctcacccccagctgccaagcatccccccaacacacactgatgggcccagcggtggaggggggggtggggacggggatgggtcacggggccctgacgggtcccgcagttaggctccctgagccctcggcttataaatacaggtcttgctttg

SEQ ID NO: 2288 - DNA, 224 bp, Homo sapiens
gaaatttcccgtgagcatcaaaaggcgtcagtcaggccgcagctctggctccagttcccgaggtttgttgtctcctcacccccagctgccaagcatccccccaacacacactgatgggcccagcggtggaggggggggtggggacggggatgggtcacggggccctgacgggtcccgcagttaggctccctgagccctcggcttataaatacaggtcttgcttt

SEQ ID NO: 2289 - DNA, 97 bp, Homo sapiens
cacgtaaacagagtgctatgttacgtactctgtgtaagatttccttcattcacccttatgtctgtgaaagcctgtgttgtgtgtagcagaagtgaca

SEQ ID NO: 2290 - DNA, 95 bp, Homo sapiens
gtgagtggacctgacaagtgccagagtaaccgtgtagacagagcagtgtagacagcattcagccccagccccaggtgtggacctcatgctggtga

SEQ ID NO: 2291 - DNA, 81 bp, Homo sapiens
gtggtgggcacctgtggtcccggttactcgggaggctgaggcaggagagtggcatgaacccgggagatgaagcttgcagtg

SEQ ID NO: 2292 - DNA, 138 bp, Homo sapiens
ttcagttaaaatgaactcaattcattgttaacttcctaaaacagaatttgaactttatcaacctcaacgggtatataaactagatagtcctcaatactttatcaacctcaacatgtatataaactagatagtcctcaa

SEQ ID NO: 2293 - DNA, 128 bp, Homo sapiens
tgtgggcactgctcgtagggcctggaactaaactcacctgtgacggaggcagaggaggggcccgggcaaaaacccacctgagctggcgggaaacccgacccgcgagcagtccccgggcttgcgcggcg

SEQ ID NO: 2294 - DNA, 176 bp, Homo sapiens
gaaacgttttcctgcaatgatccctgtgctgtaacattttgtctggtgtctcaggcttccaggttcttgttggcctgaattcccttgttgcccagtaaatgttcactagctagaagtatcttcaggaagtgagatagaaaagagtgaacctcaacaattggactggaaatgagctt

SEQ ID NO: 2295 - DNA, 263 bp, Homo sapiens
gttggctctggcctcagtaccctcagtctcctctccccacattgtgtcctgtgggggtggggtcagccgctgctctgtacagaaccacaggaactgatgtgtatataactatttaatgtgggatatgttcccctattcctgtatttcccttaattcctcctcccgaccttttttacccccccagttgcagtatttaactgggctgggtagggttgctcagtctttgggggaggttagggacttatcctgtgcttgtaaataaa

SEQ ID NO: 2296 - DNA, 243 bp, Homo sapiens
aaaatttttgctacagggtcaacttttaaattgtatatttcctttgaggcacactgggcatttggagaatggttcttcactggtgtagagagccaggtttactgttggttgcaccatctgttatcaggcatgcagaaacattttttttctggagaaacagaggggaaggtgttgttacagtgtacatgtttcctctgtgtcgtttttaagggaaataaacatgttccaaaagatgctgttaaa

SEQ ID NO: 2297 - DNA, 273 bp, Homo sapiens
gagttctgaacccagcaccatcagtaccaaagtcttatgcaatatgtatttattatgctcctgaaataggcctcttcttgatgagacccaaactattacaaaaatatcagtattcatattttactcacaattcatacccgtgcttacttagttggcattttagtgctttgaatttctatcttaaagcacagaaaaaaaaaggtaatttaatccaagtattctatcatcaaaattattgtctgattatatgaagataaatgactggcgactctg

SEQ ID NO: 2298 - DNA, 199 bp, Homo sapiens
  misc_feature (171)..(171): n is a, c, g, or t
ttaaagtatatgcaagttctaagcaataatctgcatgttatacaaggttgacatattttgtcctgaaatttttagttaacatttcaagaatgataaaatgaacaccctgtaaattacccttctccccctcccctccatgaaaaccttgggattttcttgtgctagaacacntaccacaatgtggtgcaaagctttgtat

SEQ ID NO: 2299 - DNA, 254 bp, Homo sapiens; identical to SEQ ID NO: 884

SEQ ID NO: 2300 - DNA, 250 bp, Homo sapiens; identical to SEQ ID NO: 1665

SEQ ID NO: 2301 - DNA, 40 bp, Homo sapiens; identical to SEQ ID NO: 1666

SEQ ID NO: 2302 - DNA, 283 bp, Homo sapiens; identical to SEQ ID NO: 1667

SEQ ID NO: 2303 - DNA, 270 bp, Homo sapiens; identical to SEQ ID NO: 1668

SEQ ID NO: 2304 - DNA, 219 bp, Homo sapiens; identical to SEQ ID NO: 1669

SEQ ID NO: 2305 - DNA, 287 bp, Homo sapiens; identical to SEQ ID NO: 1670

SEQ ID NO: 2306 - DNA, 227 bp, Homo sapiens; identical to SEQ ID NO: 1671

SEQ ID NO: 2307 - DNA, 187 bp, Homo sapiens; identical to SEQ ID NO: 1677

SEQ ID NO: 2308 - DNA, 238 bp, Homo sapiens; identical to SEQ ID NO: 1678

SEQ ID NO: 2309 - DNA, 150 bp, Homo sapiens; identical to SEQ ID NO: 1679

SEQ ID NO: 2310 - DNA, 155 bp, Homo sapiens; identical to SEQ ID NO: 1680

SEQ ID NO: 2311 - DNA, 241 bp, Homo sapiens
tcctgttttttcagcactttaacagatgccattccaggttaaactgggttgtctgtactaaattataaacagagttaacttgaaccttttatatgttatgcattgattctaacaaactgtaatgccctcaacagaactaattttactaatacaatactgtgttctttaaaacacagcatttacactgaatacaatttcatttgtaaaactgtaaataagagcttttgtactagcccagtat

SEQ ID NO: 2312 - DNA, 45 bp, Homo sapiens
catgaatgaatataccgtggttcatatgttagcatggcagcattt

SEQ ID NO: 2313 - DNA, 291 bp, Homo sapiens
catgaaggcagagactttggtaggaaggttttcataggaaagatacaagcaaatcagtcaatataattttgggaatctacaaagctaattgataacacaaaaagcttccaacttgaggcaagggggaaatgttttccagaaggtaaattgttaatagagtccaatgagctatttcagatttatacaaaatctctttttttatgttttcagtaatgtctatgccttataaatacatatatatatgtatacatgtaatgacttttttatgttaacaagtggaagtattatgac

SEQ ID NO: 2314 - DNA, 164 bp, Homo sapiens; identical to SEQ ID NO: 1681

SEQ ID NO: 2315 - DNA, 107 bp, Homo sapiens; identical to SEQ ID NO: 1682

SEQ ID NO: 2316 - DNA, 266 bp, Homo sapiens
gggtggcttgaagtgcttttcactctgtatccttttttgctgttttaagtcttttaccaggttggaatcttttaagggggaaaaatgatattagcctatactagttttccaggatgtggatgaagagaagggggaaatagtgatagagcacgatatctgttatttagataacagatagagaaatatctacttgtgtggtaaaatatctggaaggatagccactggaattcccagtgatgttcagcttcctactttatgcttttctg

SEQ ID NO: 2317 - DNA, 156 bp, Homo sapiens
ggaaatacttagccaaggtgctgtggcttttgagttttgatgatgacaaaaacactttggcagatgccgtcgacaagtactgcattggtgtgccacccatccagtggctggcctggatcccacagctgctcacctgcctggttggctcggagggaa

SEQ ID NO: 2318 - DNA, 266 bp, Homo sapiens; identical to SEQ ID NO: 2316

SEQ ID NO: 2319 - DNA, 278 bp, Homo sapiens
cagccaaactttaaggtggatggcattctgaaaacggttctccgggacgagatcattgcttggcacaaaaaaacacaagaggacacgtcctctcctctctcggccgccgggcagccagagaacatggacagccagcaactggtgtccctggttcagaaagccgtcaccgccatcatgacccgcctgcacaacctcgcccagttcgaaggcggggaaagcaaggtgaacaccctggtggccgcggcaaacagcctggacaatctgtgccgcatggaccc

SEQ ID NO: 2320 - DNA, 35 bp, Homo sapiens
agcagggtggccttgttcacgtgcacaaaacattg

SEQ ID NO: 2321 - DNA, 205 bp, Homo sapiens
gccacacgcatccacttcggattcagtgggtgaagacagaactctgagagtctgcaggcggctcctgtgctttttatttctggctcttcggatgtcttctagacatttactatcactgcacctgaagaaaaaatcacttttaccttcctaatttaaaaagacaaaacagaaatgtacgttccttcgctagctttagtctttctgt

SEQ ID NO: 2322 - DNA, 140 bp, Homo sapiens
atctgtggatgcatcaacctatcgtcagtcaaacccctttaaaatgttgctttggctttgtaaatttaaatatgtaagtgctatataagtcaggagcagctgtctttttaaaatgtctcggctagctagaccacagatat

SEQ ID NO: 2323 - DNA, 238 bp, Homo sapiens
tgttgttcatactgaggtctaggtaggaggtgaagacgctgaggttggaaggcagctccgagagccccaggtcggagcagtccaccctgagcaacatcctgccgtcgggctcgcaatgacagtgtgtggggcagcccctcagcaacacaccagacctgggagagctgcccccggtcgccagctgcagcagcacaggcaaggacaggagcacaccgagccgggaggtgtccatggtgcc

SEQ ID NO: 2324 - DNA, 162 bp, Homo sapiens; identical to SEQ ID NO: 70

SEQ ID NO: 2325 - DNA, 57 bp, Homo sapiens; identical to SEQ ID NO: 38

SEQ ID NO: 2326 - DNA, 158 bp, Homo sapiens; identical to SEQ ID NO: 887

SEQ ID NO: 2327 - DNA, 168 bp, Homo sapiens; identical to SEQ ID NO: 888

SEQ ID NO: 2328 - DNA, 295 bp, Homo sapiens; identical to SEQ ID NO: 889

SEQ ID NO: 2329 - DNA, 294 bp, Homo sapiens; identical to SEQ ID NO: 890

SEQ ID NO: 2330 - DNA, 201 bp, Homo sapiens; identical to SEQ ID NO: 891

SEQ ID NO: 2331 - DNA, 64 bp, Homo sapiens; identical to SEQ ID NO: 892

SEQ ID NO: 2332 - DNA, 219 bp, Homo sapiens; identical to SEQ ID NO: 893

SEQ ID NO: 2333 - DNA, 125 bp, Homo sapiens; identical to SEQ ID NO: 894

SEQ ID NO: 2334 - DNA, 277 bp, Homo sapiens
cagtgaaacacttctatacggccttcagggtgcacctgccagcctggctgcccgtccttgttacccccgccttttccaacagtgatgtaacggaaggactaattcatggcacaagagggattttcaggacgccgggccagtgtcacactcagtgactgttttgagttcagttcttgagtggagctggttgtcaaatactttaaatatcaccctagcataactctttcagctgccacacattatatgcccaataaaatgaacctttgagttgttgctt

SEQ ID NO: 2335 - DNA, 172 bp, Homo sapiens
gcagatcctctaccagcggatgagatacgagtacgagttttaccactacgtcaaagagcagttccacctgctgaagcgcaagtttggacttaagtctcacgtcagcaagccccccctgaggccacacttctttatcccaactccactggaaaccgaggagccaatcgacgat

SEQ ID NO: 2336 - DNA, 111 bp, Homo sapiens
catggtggtgggcgcttgtagccccagctactcgggaggctgaggcgggagaatggtgtgaacccgggaggtggagcttgcagtgagacaagatcgcaccactgtactcca

SEQ ID NO: 2337 - DNA, 140 bp, Homo sapiens
ttattattatgaaccttcagcctactttcttgagtgccgtaaaagtgcttgtaaattttttttttttttaagaagaaagaaaaaaatggtgtttgacgttgatggaaattcaaaaatatatatggaactgaaacattaac

SEQ ID NO: 2338 - DNA, 269 bp, Homo sapiens
ggagattgtggtcttcaagggacaattgcaaaagcaaggagttttatttttcaaagttaggaacatctcactttttgcgacatgtgttcttaccaaaaaaaaaaaatgacatttggagtaatttctgcatgtgaatcctgcttatctgaccccttcctcatggcaggactttggctgctgagctaccagcttcgtcccagaaggaaggtttgggactctgagggcctgagacttatgcatggagttctgctctagacaacagggaacat

SEQ ID NO: 2339 - DNA, 194 bp, Homo sapiens
attaatcataaacagggtggcaggtaataagcaagtggaataaaactgttagaaaacatgacacgtactatttgtttgttgttaatttccactgaagagcaaattaacactgaaagatataaagagataaactcaagaaatactgctgaaggaaaatgagaaaagatgacctgccagggttgtaagacataaag

SEQ ID NO: 2340 - DNA, 216 bp, Homo sapiens
gatagaggagggctttatacctattaatcataaacagggtggcaggtaataagcaagtggaataaaactgttagaaaacatgacacgtactatttgtttgttgttaatttccactgaagagcaaattaacactgaaagatataaagagataaactcaagaaatactgctgaaggaaaatgagaaaagatgacctgccagggttgtaagacataaag

SEQ ID NO: 2341 - DNA, 193 bp, Homo sapiens
gccaacatagcgaaagcccatgtttactaaaaatacaacaacaacaacaacaaaaaactagccaggcacagtgatgcacacctgtagtcccagatactcaggaggctaaggcccaagaatcacttgagcccaggtggcggaagttgcagtgagccgagatcacgccactgcactacagtttgggtgacatagt

SEQ ID NO: 2342 - DNA, 140 bp, Homo sapiens
cctctatgtgctgccgtccaaggaaccacacttctttggaacaaagggagctgggcaggatcatttctgtcccctccagcttttgagcccctccttgaaatctgcatttaaagcattcagaagatgctgagcatgatggc

SEQ ID NO: 2343 - DNA, 119 bp, Homo sapiens
caaaatactatttatcttggccaggcatggtggttcatgcctgtaatcccagcaatttgggaggctgaggtgggtgaatcacttgaggccaggaggtcgagatcagcatggccaacata

SEQ ID NO: 2344 - DNA, 172 bp, Homo sapiens
aggagaggcctgtgtacctgggctcggttttaggggtgtgcttgttggtgttaagtaagatagcacgatggaataatgaagtagggatgaagactttttacagataatcatgaagttctttctcagtttaaacatttgtgattaacaagagtaaaagtttagccaggcccag

SEQ ID NO: 2345 - DNA, 270 bp, Homo sapiens
aggccagattttccctctagccattcctggccacgcagcgcggagccgcgagcacacagaaaaggatgtcttcatcgccaaccgggatggaacgaacccgcccgctcagggagtactgagaactaaagggtccctccagcgccggccgcagccagcatgccttgactgcctccatcccgcgcggtccccactctccagaagcccccgccctgcccgggtgcgcgcgcgcacgagtcggcgaaccggggagctgtgcgctcggcagcctgc

SEQ ID NO: 2346 - DNA, 271 bp, Homo sapiens
agggtgtgggtttggccccatgtcactggccggaaggatgtgtctcagccctgccctgtggggtgcccccgatgggaggctgtcccatctcccagtccccatctctttttccccacactgtccctggccaagccctgcccagagctgaaccctgtagctgcccccttgccctgtgtgggattcgcagtgtctcatttggtgacgtcttactggtgatcatctcctcaccccatctcccaccttgtggaataaatacatgttagcacttccc

SEQ ID NO: 2347 - DNA, 183 bp, Homo sapiens
  misc_feature (49)..(49): n is a, c, g, or t
acttatttcattcctgggcagaatatgctcaagctttctggaggaggtngggttctcctggcaatctgggagggggctcttctgctgctcagctgctgggccatggcagccaaccatcaggtatttggtgaccaaaagaaagcggccagcacccagccaggtgaccagatgtcttcatgcctc

SEQ ID NO: 2348 - DNA, 195 bp, Homo sapiens
gtgaacagacacgtttggaagcttgtgacttaaacagagttaagtgggcttcaccgctgagtgcaacgtggtctccccagcatctttacaatgctgtgttcattacaaatatgtatatgagaaaggggcatttcccaaaccggtgcttctgcagatgggtttgctatgctaggttacccacactggagcaacagc

SEQ ID NO: 2349 - DNA, 141 bp, Homo sapiens
ccctctatgtgctgccgtccaaggaaccacacttctttggaacaaagggagctgggcaggatcatttctgtcccctccagcttttgagcccctccttgaaatctgcatttaaagcattcagaagatgctgagcatgatggc

SEQ ID NO: 2350 - DNA, 202 bp, Homo sapiens
ggcaacataccgagaaccttgtttctacaaaaaatacaaaaattagccgagggtggtgggacgcacctgctgtcccagtaactcaggagactgagctgtgaggatggattgagactaggaggtcaaggctgtggtgagatgtgattgcaccactgtactccagcctgggtgatagagtgagaccctggccactgacccccac

SEQ ID NO: 2351 - DNA, 51 bp, Homo sapiens
cactctggagagaagaagctgcatgaaaattacttaattcctgtaatccca

SEQ ID NO: 2352 - DNA, 170 bp, Homo sapiens
aattgagtttgttagagtacatccctaatccaatatgattggtgtccctataagaagagaaagacacaactgagacaacaaatagaagatgatgtgaagtcatcagatgatggccatttgcaagccaaagacagagcactgggacagatccttttatcaaagcccccaac

SEQ ID NO: 2353 - DNA, 238 bp, Homo sapiens
agtttgggaccaccatgcttagaatcagattgactgaggagctttacagagactttcacttgcacagtatttaaaaaaaaaaaatgtgtgtgtgtgtgtgtgtgtgtgtgtgtgtgtgtgtgtgtatgtatataaatttttaaagtgcccacttggccgggtgcagtggctcacgcctgtaatcctaacactttcagaggctgaggcaggaggattgctagagcccagagcttgaggc

SEQ ID NO: 2354 - DNA, 67 bp, Homo sapiens
agtttgggaccaccatgcttagaatcagattgactgaggagctttacagagactttcacttgcacag

SEQ ID NO: 2355 - DNA, 46 bp, Homo sapiens
tctctttcaatgtaccttccttcacctcgtcgtatatatcctcgat

SEQ ID NO: 2356 - DNA, 276 bp, Homo sapiens
aaaaggctcagtaagagtaccgggcgcagtggctcacgcctctaatcctagcactttgggaggccaaagtgggcggattgcctgagctcaggagttcgagaccagcctgggcaacatagtgaaaccctgtctctactaaaatacaaaaaaattagccaggcatggcggtgcgtgcctgcagtcccagctacttgggaggctgaggcaggagaattgcttgaacctgggaggcagaggttgcagtgagctgagattatgctgttacactccagtctg

SEQ ID NO: 2357 - DNA, 193 bp, Homo sapiens
taagattcagaactggccgggcatggtggctcatgcctgtaatcccagcactttgggaggccaatgcaggtggatcacttgaggtcaggagttcgagaccccccctggccaacatgacgaaaccccatttttgctaaaagtacaaaaatgagctgggcatagtggcaggtgccttgtgatcccagctatttgg

SEQ ID NO: 2358 - DNA, 181 bp, Homo sapiens
agcctgtgtggtaggccacataggtccgaataacctagttttacagttgagggagctgagttcagattcagttctttgccgaagccctcatagctggtaagtggctttgcatattagaacccaaatattttgctctttaaatttaatgctcgctttatgtggttatgtacatattgacaaa

SEQ ID NO: 2359 - DNA, 249 bp, Homo sapiens
tctgtcccttccgtttatagttctctgagagagttctattttttggttttgttttgtgttttcttttgcattttgtatcttgtatttatccctgaacatgttttgtaccttttttttttttttttttaagaaaaggaattcttttgtgtatatatagatacttgcatgatatactgtagtcaatgttcggttcctcaaaaggtcttgctgctgtcaggtgttatgcactccatccatcataactgtatg

SEQ ID NO: 2360 - DNA, 38 bp, Homo sapiens
aacctgggaagcagaagttgttttgagccaagatcatg

SEQ ID NO: 2361 - DNA, 164 bp, Homo sapiens
taagtcataacaggaagaagattctttgcagtaagctgctcttgaagaacaaaaaggaagggggatttctttcatcacagctgcttcccagggttaactacctactccatcttttccccactcctttctcttgccctacacatctcttccattaggctgagttg

SEQ ID NO: 2362 - DNA, 146 bp, Homo sapiens
  misc_feature (87)..(87): n is a, c, g, or t
tcattgcacactgaatttttctctgataaatctaatgtcttctgggttcagactttatcccgtacaaatccttttttcttgcctgtnattcatgtgagaagaattatataattttcttatttcaaagcttataaactattacttat

SEQ ID NO: 2363 - DNA, 228 bp, Homo sapiens
gaagcagaagtggtacatgattagtagttgaagctgggggcaggtctatatattttatttttatgtctttaatagcatttgtataaatgtacaatattcgtttacaatgttagctcaggatcttgtttacctttggacagggagggagggagaaatttattttctgggtaggagtaaagctggttctattcctcagttatgtaaattatctgttataatccaaaaagc

SEQ ID NO: 2364 - DNA, 50 bp, Homo sapiens
ctaacatgtacagttaaggtttatgccttgcaatgtatgtacatcttcac

SEQ ID NO: 2365 - DNA, 175 bp, Homo sapiens
taatattgtatgaattagcatcagggagaggtggagaaaaatacaaaactaaaagtcatgcttattgtgttcagtgtgcccttctccagagggccactggcttataggaaaggattgctgctttaccagttgaccaggagatggcacgccaggacattaagacactggagttttg

1. A method for selecting whether to administer an anti-angiogenic therapeutic agent to a subject with cancer, comprising:
measuring the expression levels of at least 3 biomarkers in a sample from the subject, wherein at least two of the biomarkers are from Table A and at least one of the biomarkers is from Table B and assessing from the expression levels of the biomarkers whether the cancer belongs to a cancer sub-type
wherein the cancer sub-type is defined by the expression levels of the genes in Tables A and B.
wherein if the cancer belongs to the sub-type an anti-angiogenic therapeutic agent is contraindicated
wherein the at least 3 biomarkers do not comprise at least two biomarkers selected from COL1A2, COL3A1, TIMP3, COL4A1, COL8A1, CDH11, TIMP2, ANGPTL2, and MMP14 and at least one biomarker selected from CIITA, XAF1 and CD74.

2. A method for selecting whether to administer an anti-angiogenic therapeutic agent to a subject with cancer, comprising:
measuring the expression levels of at least 3 biomarkers in a sample from the subject, wherein at least two of the biomarkers are from Table A and at least one of the biomarkers is from Table B and assessing from the expression levels of the biomarkers whether the cancer belongs to a cancer sub-type, wherein if the cancer belongs to the subtype the expression levels of the at least two biomarkers from Table A and the at least one biomarker from Table B are increased or decreased as defined for each biomarker in Table A and Table B
wherein the cancer sub-type is defined by the expression levels of the genes in Tables A and B
wherein if the cancer belongs to the sub-type an anti-angiogenic therapeutic agent is contraindicated.

3. A method for predicting the responsiveness of a subject with cancer to an anti-angiogenic therapeutic agent comprising:
allocating the cancer to a cancer sub-type by measuring the expression levels of at least 3 biomarkers in a sample from the subject, wherein at least two of the biomarkers are from Table A and at least one of the biomarkers is from Table B and assessing from the expression levels of the biomarkers whether the cancer belongs to the sub-type
wherein the cancer sub-type is defined by the expression levels of the genes in Tables A and B
classifying the subject as responsive or non-responsive to the anti-angiogenic therapeutic agent on the basis of allocation to the subtype, wherein if the cancer belongs to the sub-type it is predicted to be non-responsive to the anti-angiogenic therapeutic agent
wherein the at least 3 biomarkers do not comprise at least two biomarkers selected from COL1A2, COL3A1, TIMP3, COL4A1, COL8A1, CDH11, TIMP2, ANGPTL2, and MMP14 and at least one biomarker selected from CIITA, XAF1 and CD74.

4. A method for predicting the responsiveness of a subject with cancer to an anti-angiogenic therapeutic agent comprising:
allocating the cancer to a cancer sub-type by measuring the expression level of at least 3 biomarkers in a sample from the subject, wherein at least two of the biomarkers are from Table A and at least one of the biomarkers is from Table B and assessing from the expression levels of the biomarkers whether the cancer belongs to the sub-type wherein if the cancer belongs to the subtype the expression levels of the at least two biomarkers from Table A and the at least one biomarker from Table B are increased or decreased as defined for each biomarker in Table A and Table B wherein the cancer sub-type is defined by the expression levels of the genes in Tables A and B
classifying the subject as responsive or non-responsive to the anti-angiogenic therapeutic agent on the basis of allocation to the subtype, wherein if the cancer belongs to the sub-type it is predicted to be non-responsive to the anti-angiogenic therapeutic agent.

5. A method of determining clinical prognosis of a subject with cancer comprising: measuring the expression level of at least 3 biomarkers in a sample from the subject,
wherein at least two of the biomarkers are from Table A and at least one of the biomarkers is from Table B and assessing from the expression levels of the biomarkers whether the cancer belongs to a cancer sub-type
wherein the cancer sub-type is defined by the expression levels of the genes in Tables A and B
classifying the subject as having a good prognosis if the cancer belongs to the sub-type
wherein the at least 3 biomarkers do not comprise at least two biomarkers selected from COL1A2, COL3A1, TIMP3, COL4A1, COL8A1, CDH11, TIMP2, ANGPTL2, and MMP14 and at least one biomarker selected from CIITA, XAF1 and CD74.

6. A method of determining clinical prognosis of a subject with cancer comprising: measuring the expression level of at least 3 biomarkers in a sample from the subject,
wherein at least two of the biomarkers are from Table A and at least one of the biomarkers is from Table B and assessing from the expression levels of the biomarkers whether the cancer belongs to a cancer sub-type wherein if the cancer belongs to the subtype the expression levels of the at least two biomarkers from Table A and the at least one biomarker from Table B are increased or decreased as defined for each biomarker in Table A and Table B
wherein the cancer sub-type is defined by the expression levels of the genes in Tables A and B
classifying the subject as having a good prognosis if the cancer belongs to the sub-type.

7. A method for selecting whether to administer an anti-angiogenic therapeutic agent to a subject with cancer, comprising:
measuring the expression levels of at least 2 biomarkers in a sample from the subject and assessing from the expression levels of the biomarkers whether the cancer belongs to a cancer sub-type
wherein the cancer sub-type is defined by the expression levels of the genes in Tables A and B
wherein if the cancer belongs to the sub-type an anti-angiogenic therapeutic agent is contraindicated
wherein the at least 2 biomarkers do not consist of from 1 to 63 of the biomarkers shown in Table C.

8. A method for predicting the responsiveness of a subject with cancer to an anti-angiogenic therapeutic agent comprising:
allocating the cancer to a cancer sub-type by measuring the expression levels of at least 2 biomarkers in a sample from the subject and assessing from the expression levels of the biomarkers whether the cancer belongs to the sub-type
wherein the cancer sub-type is defined by the expression levels of the genes in Tables A and B
classifying the subject as responsive or non-responsive to the anti-angiogenic therapeutic agent on the basis of allocation to the subtype, wherein if the cancer belongs to the sub-type it is predicted to be non-responsive to the anti-angiogenic therapeutic agent
wherein the at least 2 biomarkers do not consist of from 1 to 63 of the biomarkers shown in Table C.

9. A method of determining clinical prognosis of a subject with cancer comprising:
measuring the expression levels of at least 2 biomarkers in a sample from the subject and assessing from the expression levels of the biomarkers whether the cancer belongs to a cancer sub-type
wherein the cancer sub-type is defined by the expression levels of the genes in Tables A and B
classifying the subject as having a good prognosis if the cancer belongs to the sub-type
wherein the at least 2 biomarkers do not consist of from 1 to 63 of the biomarkers shown in Table C.

10. The method of claim 5, 6 or 9, wherein the subject is receiving, has received and/or will receive a standard chemotherapeutic treatment for the subject's cancer type and/or will not receive an anti-angiogenic therapeutic agent.

11. The method of claim 5, 6, 9 or 10, wherein good prognosis indicates increased progression free survival and/or overall survival rates and/or decreased likelihood of recurrence or metastasis compared to subjects with cancers that do not belong to the sub-type.

12. A method of treating cancer comprising administering a chemotherapeutic agent to a subject wherein the subject is selected for treatment on the basis of a method as claimed in any previous claim and wherein an anti-angiogenic therapeutic agent is not administered (if the cancer is determined to belong to the subtype).

13. A method of treating cancer comprising administering a chemotherapeutic agent and not administering an anti-angiogenic therapeutic agent to a subject, wherein the subject has a cancer that has been determined to belong to a cancer sub-type,
wherein the cancer sub-type is defined by the expression levels of the genes in Tables A and B, by either:
(i) measuring the expression levels of at least 3 biomarkers in a sample from the subject, wherein at least two of the biomarkers are from Table A and at least one of the biomarkers is from Table B and assessing from the expression levels of the biomarkers whether the cancer belongs to the cancer sub-type
wherein the at least 3 biomarkers do not comprise at least two biomarkers selected from COL1A2, COL3A1, TIMP3, COL4A1, COL8A1, CDH11, TIMP2, ANGPTL2, and MMP14 and at least one biomarker selected from CIITA, XAF1 and CD74; or
(ii) measuring the expression levels of at least 2 biomarkers in a sample from the subject and assessing from the expression levels of the biomarkers whether the cancer belongs to the cancer sub-type
wherein the at least 2 biomarkers do not consist of from 1 to 63 of the biomarkers shown in Table C.

14. A chemotherapeutic agent for use in treating cancer in a subject wherein the subject is selected for treatment on the basis of a method as claimed in any previous claim and wherein the subject is not treated with an anti-angiogenic therapeutic agent (if the cancer is determined to belong to the subtype).

15. A chemotherapeutic agent for use in treating cancer in a subject wherein the subject has a cancer that has been determined to belong to a cancer sub-type, wherein the cancer sub-type is defined by the expression levels of the genes in Tables A and B, by either:
(i) measuring the expression levels of at least 3 biomarkers in a sample from the subject, wherein at least two of the biomarkers are from Table A and at least one of the biomarkers is from Table B and assessing from the expression levels of the biomarkers whether the cancer belongs to the cancer sub-type
wherein the at least 3 biomarkers do not comprise at least two biomarkers selected from COL1A2, COL3A1, TIMP3, COL4A1, COL8A1, CDH11, TIMP2, ANGPTL2, and MMP14 and at least one biomarker selected from CIITA, XAF1 and CD74; or
(ii) measuring the expression levels of at least 2 biomarkers in a sample from the subject and assessing from the expression levels of the biomarkers whether the cancer belongs to the cancer sub-type
wherein the at least 2 biomarkers do not consist of from 1 to 63 of the biomarkers shown in Table C.
and wherein the subject is not treated with an anti-angiogenic therapeutic agent.

16. A method of treating cancer comprising administering a chemotherapeutic agent to a subject wherein the subject has a cancer that belongs to a cancer sub-type
defined by the expression levels of the genes in Tables A and B and wherein an anti-angiogenic therapeutic agent is not administered.

17. A chemotherapeutic agent for use in treating cancer in a subject wherein the subject has a cancer that belongs to a cancer sub-type defined by the expression levels of the genes in Tables A and B and wherein the subject is not treated with an anti-angiogenic therapeutic agent.

18. The method of any of claims 12, 13, or 16 or chemotherapeutic agent for use of any of claims 14, 15, or 17, wherein the chemotherapeutic agent comprises a platinum-based chemotherapeutic agent, an alkylating agent, an anti-metabolite, an anti-tumor antibiotic, a topoisomerase inhibitor, a mitotic inhibitor, or a combination thereof.

19. The method of any of claims 12, 13, or 16 or chemotherapeutic agent for use of any of claims 14, 15, or 17, wherein the chemotherapeutic agent comprises a platinum based-chemotherapeutic agent, a mitotic inhibitor, or a combination thereof.

20. The method of any of claims 12, 13, or 16 or chemotherapeutic agent for use of any of claims 14, 15, or 17, wherein the chemotherapeutic agent comprises carboplatin and/or paclitaxel.

21. The method of any of claims 1 to 13, 16, or 18 to 20 or chemotherapeutic agent for use of any of claims 14, 15, or 17 to 20 wherein assessing whether the cancer belongs to the sub-type comprises:
determining a sample expression score for the biomarkers;
comparing the sample expression score to a threshold score; and
determining whether the sample expression score is above or
equal to or below the threshold expression score,
wherein if the sample expression score is above or equal to the threshold expression score the cancer belongs to the sub-type.

22. The method of any of claims 1 to 13, 16, or 18 to 21 or chemotherapeutic agent for use of any of claims 14, 15, or 17 to 21 wherein the at least two biomarkers do not comprise any one or more of the 63 biomarkers shown in table C.

23. The method of any of claims 1 to 13, 16, or 18 to 22 or chemotherapeutic agent for use of any of claims 14, 15, or 17 to 22, wherein the cancer sub-type is defined by increased and decreased expression levels of the genes listed in Tables A and B as shown in Tables A and B.

24. The method of any of claims 1 to 13, 16, or 18 to 23 or chemotherapeutic agent for use of any of claims 14, 15, or 17 to 23, wherein the subject is receiving, has received and/or will receive (optionally together with the anti-angiogenic therapeutic agent) treatment with a chemotherapeutic agent.

25. The method of any of claims 1 to 13, 16, or 18 to 24 or chemotherapeutic agent for use of any of claims 14, 15, or 17 to 24 further comprising obtaining a test sample from the subject.

26. The method of any of claims 1 to 13, 16, or 18 to 25 or chemotherapeutic agent for use of any of claims 14, 15, or 17 to 25, wherein the cancer is ovarian cancer, peritoneal cancer or fallopian tube cancer.

27. The method or chemotherapeutic agent for use of claim 26, wherein the ovarian cancer is serous ovarian cancer, optionally high grade serous ovarian cancer.

28. The method of any of claims 1 to 13, 16, or 18 to 27 or chemotherapeutic agent for use of any of claims 14, 15, or 17 to 27, wherein the subject is receiving, has received and/or will receive an anti-angiogenic therapeutic agent.

29. The method of any of claims 1 to 4, 7, 8, 10 to 13 16, or 18 to 28 or chemotherapeutic agent for use of any of claims 14, 15, or 17 to 28, wherein the anti-angiogenic therapeutic agent is a VEGF-pathway-targeted therapeutic agent, an angiopoietin-TIE2 pathway inhibitor, an endogenous angiogenic inhibitor, or an immunomodulatory agent.

30. The method or chemotherapeutic agent for use of claim 29, wherein the VEGF pathway-targeted therapeutic agent is selected from Bevacizumab (Avastin), Aflibercept (VEGF Trap), IMC-1121B (Ramucirumab), Imatinib (Gleevec), Sorafenib (Nexavar), Gefitinib (Iressa), Sunitinib (Sutent), Erlotinib, Tivozinib, Cediranib (Recentin), Pazopanib (Votrient), BIBF 1120 (Vargatef), Dovitinib, Semaxanib (Sugen), Axitinib (AG013736), Vandetanib (Zactima), Nilotinib (Tasigna), Dasatinib (Sprycel), Vatalanib, Motesanib, ABT-869, TKI-258 or a combination thereof.

31. The method or chemotherapeutic agent for use of claim 29, wherein the angiopoietin-TIE2 pathway inhibitor is selected from AMG-386, PF-4856884 CVX-060, CEP-11981, CE-245677, MEDI-3617, CVX-241, Trastuzumab (Herceptin) or a combination thereof.

32. The method or chemotherapeutic agent for use of claim 29, wherein the endogenous angiogenic inhibitor is selected from Thombospondin, Endostatin, Tumstatin, Canstatin, Arrestin, Angiostatin, Vasostatin, Interferon alpha or a combination thereof.

33. The method or chemotherapeutic agent for use of claim 29, wherein the immunomodulatory agent is selected from thalidomide and lenalidomide.

34. The method or chemotherapeutic agent for use of claim 30, wherein the VEGF pathway-targeted therapeutic agent is bevacizumab.

35. A method for selecting whether to administer Bevacizumab to a subject, comprising:
in a test sample obtained from a subject suffering from ovarian cancer, which subject is being, has been and/or will be treated using a platinum-based chemotherapeutic agent and/or a mitotic inhibitor;
measuring expression levels of at least 2 biomarkers;
determining a sample expression score for the 2 or more biomarkers;
comparing the sample expression score to a threshold score;
wherein if the sample expression score is above or equal to the threshold expression score the cancer belongs to a cancer sub-type defined by the expression levels of the genes in Tables A and B
selecting a treatment based on whether the cancer belongs to the sub-type, wherein if the cancer belongs to the sub-type Bevacizumab is contraindicated.

36. The method of claim 35 further comprising obtaining the sample from the subject.

37. The method of claim 35 or 36 wherein the ovarian cancer comprises serous ovarian cancer.

38. The method of claim 37 wherein the serous ovarian cancer is high grade serous ovarian cancer.

39. The method of any one of claims 35 to 38 wherein if Bevacizumab is contraindicated the patient is treated with a platinum-based chemotherapeutic agent and/or a mitotic inhibitor.

40. The method of any one of claims 35 to 38 wherein if the cancer does not belong to the sub-type the patient is treated with a platinum-based chemotherapeutic agent and/or a mitotic inhibitor together with Bevacizumab.

41. The method of any of claims 7 to 13, 16, or 18 to 40 or chemotherapeutic agent for use of any of claims 14, 15, or 17 to 34 comprising measuring the expression level of at least 3 biomarkers in a sample from the subject, wherein at least two of the biomarkers are from Table A and at least one of the biomarkers is from Table B.

42. The method of any of claims 7 to 13, 16, or 18 to 40 or chemotherapeutic agent for use of any of claims 14, 15, or 17 to 34 comprising measuring the expression levels of at least 4 of the biomarkers from Table F.

43. The method of any of claims 7 to 13, 16, 18 to 40 or 42 or chemotherapeutic agent for use of any of claims 14, 15, 17 to 34 or 42 comprising measuring the expression levels of at least one of GABRE, HLA-DPA1, CHI3L1, KCND2, GBP3, UPK2, SYTL4, LRRN1, USP53 and POU2F3.

44. The method of any of claims 7 to 13, 16, 18 to 40 or 42 or chemotherapeutic agent for use of any of claims 14, 15, or 17 to 34 or 42 comprising measuring the expression levels of each of GABRE, HLA-DPA1, CHI3L1, KCND2, GBP3, UPK2, SYTL4, LRRN1, USP53 and POU2F3.

45. The method of any of claims 7 to 13, 16, 18 to 40 or 42 or chemotherapeutic agent for use of any of claims 14, 15, or 17 to 34 or 42 comprising measuring the expression levels of each of the biomarkers from Table F.

46. The method of any of claims 7 to 13, 16, 18 to 40 or 42 to 45 or chemotherapeutic agent for use of any of claims 14, 15, 17 to 34 or 42 to 45 comprising measuring the expression levels of at least 10 of the biomarkers from Table I.

47. The method of any of claims 7 to 13, 16, 18 to 40 or 42 to 46 or chemotherapeutic agent for use of any of claims 14, 15, 17 to 34 or 42 to 46 comprising measuring the expression levels of at least one of MT1L, MT1G, LRP4, RASL11B, IFI27, PKIA, ALOX5AP, UBD, MEX3B, and TMEM98.

48. The method of any of claims 7 to 13, 16, 18 to 40 or 42 to 46 or chemotherapeutic agent for use of any of claims 14, 15, 17 to 34 or 42 to 46 comprising measuring the expression levels of each of MT1L, MT1G, LRP4, RASL11B, IFI27, PKIA, ALOX5AP, UBD, MEX3B, and TMEM98.

49. The method of any of claims 7 to 13, 16, 18 to 40 or 42 to 46 or chemotherapeutic agent for use of any of claims 14, 15, 17 to 34 or 42 to 46, comprising measuring the expression levels of each of the biomarkers listed in Table I.

50. The method of any of claims 7 to 13, 16, 18 to 40 or 42 to 49 or chemotherapeutic agent for use of any of claims 14, 15, 17 to 34 or 42 to 49 comprising measuring the expression levels of at least 15 of the biomarkers from Table L.

51. The method of any of claims 7 to 13, 16, 18 to 40 or 42 to 50 or chemotherapeutic agent for use of any of claims 14, 15, 17 to 34 or 42 to 50 comprising measuring the expression levels of at least one of MTL1, GABRE, KCND2, UPK2, HLA-DPA1, SYTL4, SCEL, MZT1, EFNB3, and DLL1.

52. The method of any of claims 7 to 13, 16, 18 to 40 or 42 to 50 or chemotherapeutic agent for use of any of claims 14, 15, 17 to 34 or 42 to 50 comprising measuring the expression levels of each of MTL1, GABRE, KCND2, UPK2, HLA-DPA1, SYTL4, SCEL, MZT1, EFNB3, and DLL1.

53. The method of any of claims 7 to 13, 16, 18 to 40 or 42 to 50 or chemotherapeutic agent for use of any of claims 14, 15, 17 to 34 or 42 to 50, comprising measuring the expression levels of each of the biomarkers listed in Table L.

54. The method of any of claims 1 to 13, 16, or 18 to 53 or chemotherapeutic agent for use of any of claims 14, 15, 17 to 34 or 41 to 53, wherein the expression score is calculated using a weight value and/or a bias value for each biomarker.

55. The method of any of claims 1 to 13, 16, or 18 to 54 or chemotherapeutic agent for use of any of claims 14, 15, 17 to 34 or 41 to 54 wherein the expression level is determined at the level of RNA.

56. The method or chemotherapeutic agent for use of claim 55 wherein the expression level is determined by microarray, northern blotting, or nucleic acid amplification.

57. The method or chemotherapeutic agent for use of claim 55 or 56, wherein measuring the expression levels of the biomarkers comprises contacting the sample with a set of nucleic acid probes or primers that bind to the biomarkers and detecting binding of the set of nucleic acid probes or primers to the biomarkers by microarray, northern blotting, or nucleic acid amplification.

58. A method of deriving a panel of at least 2 biomarkers, wherein the expression level(s) of the at least 2 biomarkers in a sample from a subject with a cancer allows the cancer to be allocated to a sub-type
wherein the cancer sub-type is defined by the expression levels of the genes in Tables A and B
said method comprising the steps of:
sorting samples from a sample set of known pathology and/or clinical outcome on the basis of allocation to the sub-type obtaining the expression profiles of the samples analysing the expression profiles from the sample set using a mathematical model identifying from the results of the mathematical model one or more biomarkers expressed in the sample set that are most predictive of the cancer sub-type.

59. The method of claim 58, wherein the cancer sub-type is defined by increased and decreased expression levels of the genes listed in Tables A and B as shown in Tables A and B

60. The method of claim 58 or 59, wherein the mathematical model is a parametric, non-parametric or semi-parametric model.

61. The method of any of claims 58 to 60, wherein the mathematical model is Partial Least Squares (PLS), Shrinkage Discriminate Analysis (SDA), or Diagonal SDA (DSDA).

62. The method of any of claims 58 to 61 wherein identifying from the results of the mathematical model one or more biomarkers expressed in the sample set that are most predictive of the cancer sub-type comprises identifying one or more biomarkers for which area under the receiver operator characteristic curve (AUC) and Concordance Index (C-Index) are significant.

63. The method of any of claims 1 to 13, 16, or 18 to 62 or chemotherapeutic agent for use of any of claims 14, 15, 17 to 34 or 41 to 62,
wherein the cancer is allocated to the sub-type based on the expression level of a panel of one or more biomarkers derived using the method of any of claims 58-62 in a sample from the subject.

64. An anti-angiogenic therapeutic agent for use in treating cancer in a subject wherein the subject is selected for treatment on the basis of a method as claimed in any previous claim, wherein allocation of the subject to the subtype contra-indicates the anti-angiogenic therapeutic agent.

65. A method for selecting whether to administer an anti-angiogenic therapeutic agent to a subject having a cancer substantially as herein described.

66. A method for predicting the responsiveness of a subject with cancer to an anti-angiogenic therapeutic agent substantially as herein described.

67. A method of determining clinical prognosis substantially as herein described.

68. A method for selecting whether to administer Bevacizumab to a subject substantially as herein described.

69. A chemotherapeutic agent for use in treating cancer substantially as herein described.

70. A method of treating cancer substantially as herein described.
